(19) United States
(12) Patent Application Publication
(10) Pub. No.: US 2025/0270627 A1
(43) Pub. Date: Aug. 28, 2025

(54) Genotyping Methods and Systems

(71) Applicant: Illumina, Inc., San Diego, CA (US)

(72) Inventors: Andrew OSTROW, San Diego, CA (US); Bret BARNES, San Diego, CA (US); Thu NGUYEN, San Diego, CA (US); Karen SHANNON, San Diego, CA (US); Carey DAVIS, San Diego, CA (US); Brian CHIN, San Diego, CA (US); Sarah HANSON, San Diego, CA (US)

(21) Appl. No.: 18/702,060

(22) PCT Filed: Oct. 22, 2021
(86) PCT No.: PCT/US2021/056305

§ 371 Date: Apr. 17, 2024

(51) Int. Cl. C12Q 1/6827; C12Q 1/6806; C12Q 1/686; C12Q 1/6876

(52) U.S. Cl. CPC C12Q 1/6827; C12Q 1/6806; C12Q 1/686; C12Q 1/6876; C12Q 2600/106; C12Q 2600/156

(57) ABSTRACT

Provided herein are compositions and methods related to probe-based genotyping, such as pharmacogenomic genotyping.

### CROSS REFERENCE TO RELATED APPLICATION

[0001] This application is a US 371 National Stage Application from PCT/2021/056305 filed Oct. 22, 2021, the contents of which is incorporated herein by reference in its entirety.

### SEQUENCE LISTING

[0002] The instant application contains a Sequence Listing which has been submitted electronically in ASCII format and is hereby incorporated by reference in its entirety. Said ASCII copy, created on Dec. 29, 2021, is named 35629-0037WO1_SL.txt and is 652,900 bytes in size.

### TECHNICAL FIELD

[0003] Provided herein are compositions and methods related to probe based genotyping methods and systems of, for example, high homology regions such as PGx genes.

### BACKGROUND

[0004] The study of genetically influenced variations in drug response and adverse drug reactions (ADRs) is known as pharmacogenomics (PGx). See, e.g., Arbitrio et al., “Pharmacogenomic Profiling of ADME Gene Variants: Current Challenges and Validation Perspectives,” High Throughput 7 (4): 40 (2018). Polymorphic variants in genes related to drug absorption, distribution, metabolism, and excretion (ADME) contribute to variability amongst individuals in drug efficacy and adverse effects. Id. Identification of PGx markers, therefore, enables optimization of treatment based on an individual's genotype. However, pharmacogenomic marker genotyping is complicated by high homozygosity.

### SUMMARY

[0005] The present application is based, at least in part, on the discovery that probe based genotyping of high homology regions, such as PGx genes, is improved, for example, by combining targeted enrichment with whole-genome amplification.

[0006] Thus, described herein are methods of genotyping one or more pharmacogenomic markers, including: obtaining a nucleic acid sample; amplifying a first portion of the genomic DNA sample by whole genome amplification (WGA), thereby producing a WGA sample portion; amplifying a second portion of the genomic DNA sample by a targeted gene amplification (TGA) method that selectively amplifies one or more pharmacogenomic genes or fragments thereof, thereby producing a TGA sample portion; optionally combining the whole genome amplified sample portion and the target amplified sample portion to produce a combined WGA/TGA sample portion; fragmenting the WGA or WGA/TGA sample; hybridizing the WGA and TGA samples or the WGA/TGA combined sample to a plurality of probes complementary to one or more of the pharmacogenomic genes or fragments thereof; and detecting hybridization, thereby genotyping a pharmacogenomic marker.

[0007] In some embodiments, the nucleic acid sample is a genomic DNA sample is from a human subject.

[0008] In some embodiments, the one or more pharmacogenomic genes are selected from the group consisting of ABCB1, ABCC4, ABCG2, ACE, ALDH1A1, ALK, BCKDK, BCR, BRAF, C8orf34, CACNA1S, CES1, CFTR, CHRNA3, COL22A1, COQ2, CRHR1, CYP19A1, CYP21A2, CYP2A6, CYP2A7P1, CYP2B6, CYP2C19, CYP2C8, CYP2C9, CYP2D6, CYP2E1, CYP3A, CYP3A5, CYP4F2, DPYD, DYNC2H1, EGFR, EPHX1, ERBB2, F5, FCGR3A, FKBP5, G6PD, GGCX, GSTM1, GSTT1, HCP5, HLA-A, HLA-B, HLA-C, HLA-DPB1, HLA-DQA1, HLA-DRB1, HMGCR, IFNL3, IFNL4, KCNIP4, KIF6, KIT, LPA, MTRR, NEDD4L, NQO1, NUDT15, OPRM1, POLG, POR, PRKCA, PRSS53, PSORS1C1, PTGFR, RYR1, SCN1A, SCN5A, SEMA3C, SLC19A1, SLC28A3, SLC6A4, SLCO1B1, SLCO1B3, SOD2, SULT1A1, TANC1, TBXAS1, TMEM43, TPMT, TXNRD2, TYMS, UGT1A1, UGT1A4, UGT1A5, UGT2B17, UGT2B28, VDR, VKORC1, YEATS4, ZNRD1-AS1, and combinations thereof.

[0009] In some embodiments, the one or more pharmacogenomic genes are selected from the group consisting of BCKDK, CACNA1S, CFTR, CYP2A7P1, CYP2B6, CYP2B6, CYP2C19, CYP2C9, CYP2D6, CYP3A, CYP3A5, CYP4F2, DPYD, F5, G6PD, HCP5, HLA-A, IFNL3, NUDT15, PRSS53, PSORS1C1, RYR1, SLCO1B1, TPMT, UGT1A1, VKORC1, ZNRD1-AS1, and combinations thereof.

[0010] In some embodiments, the one or more pharmacogenomic genes are selected from the group consisting of ABCB1, ABCC4, ABCG2, ACE, ALDH1A1, ALK, BCR, BRAF, C8orf34, CACNA1S, CES1, CFTR, CHRNA3, COL22A1, COQ2, CRHR1, CYP19A1, CYP21A2, CYP2A6, CYP2B6, CYP2C19, CYP2C8, CYP2C9, CYP2D6, CYP2E1, CYP3A5, CYP4F2, DPYD, DYNC2H1, EGFR, EPHX1, ERBB2, F5, FCGR3A, FKBP5, G6PD, GGCX, GSTM1, GSTT1, HLA-A, HLA-B, HLA-C, HLA-DPB1, HLA-DQA1, HLA-DRB1, HMGCR, IFNL3, IFNL4, KCNIP4, KIF6, KIT, LPA, MTRR, NEDD4L, NQO1, NUDT15, OPRM1, POLG, POR, PRKCA, PTGFR, RYR1, SCN1A, SCN5A, SEMA3C, SLC19A1, SLC28A3, SLC6A4, SLCO1B1, SLCO1B3, SOD2, SULT1A1, TANC1, TBXAS1, TMEM43, TPMT, TXNRD2, TYMS, UGT1A1, UGT1A4, UGT2B17, UGT2B28, VDR, VKORC1, YEATS4, and combinations thereof.

[0011] In some embodiments, the one or more pharmacogenomic markers are selected from those in Table 9.

[0012] In some embodiments, the one or more pharmacogenomic markers are copy number variants in ABCB1, ABCC4, ABCG2, ACE, ALDH1A1, ALK, BCR, BRAF, C8orf34, CACNA1S, CES1, CFTR, CHRNA3, COL22A1, COQ2, CRHR1, CYP19A1, CYP21A2, CYP2A6, CYP2B6, CYP2C19, CYP2C8, CYP2C9, CYP2D6, CYP2E1, CYP3A5, CYP4F2, DPYD, DYNC2H1, EGFR, EPHX1, ERBB2, F5, FCGR3A, FKBP5, G6PD, GGCX, GSTM1, GSTT1, HLA-A, HLA-B, HLA-C, HLA-DPB1, HLA-DQA1, HLA-DRB1, HMGCR, IFNL3, IFNL4, KCNIP4, KIF6, KIT, LPA, MTRR, NEDD4L, NQO1, NUDT15, OPRM1, POLG, POR, PRKCA, PTGFR, RYR1, SCN1A, SCN5A, SEMA3C, SLC19A1, SLC28A3, SLC6A4, SLCO1B1, SLCO1B3, SOD2, SULT1A1, TANC1, TBXAS1, TMEM43, TPMT, TXNRD2, TYMS, UGT1A1, UGT1A4, UGT2B17, UGT2B28, VDR, VKORC1, YEATS4, and combinations thereof.

[0013] In some embodiments, the one or more pharmacogenomic markers are selected from the group consisting of those in Table 9, copy number variants in ABCB1, ABCC4, ABCG2, ACE, ALDH1A1, ALK, BCR, BRAF, C8orf34, CACNA1S, CES1, CFTR, CHRNA3, COL22A1, COQ2, CRHR1, CYP19A1, CYP21A2, CYP2A6, CYP2B6, CYP2C19, CYP2C8, CYP2C9, CYP2D6, CYP2E1, CYP3A5, CYP4F2, DPYD, DYNC2H1, EGFR, EPHX1, ERBB2, F5, FCGR3A, FKBP5, G6PD, GGCX, GSTM1, GSTT1, HLA-A, HLA-B, HLA-C, HLA-DPB1, HLA-DQA1, HLA-DRB1, HMGCR, IFNL3, IFNL4, KCNIP4, KIF6, KIT, LPA, MTRR, NEDD4L, NQO1, NUDT15, OPRM1, POLG, POR, PRKCA, PTGFR, RYR1, SCN1A, SCN5A, SEMA3C, SLC19A1, SLC28A3, SLC6A4, SLCO1B1, SLCO1B3, SOD2, SULT1A1, TANC1, TBXAS1, TMEM43, TPMT, TXNRD2, TYMS, UGT1A1, UGT1A4, UGT2B17, UGT2B28, VDR, VKORC1, YEATS4, and combinations thereof.

[0014] In some embodiments, amplifying a second portion of the genomic DNA sample comprises amplifying one or more regions of one or more pharmacogenomic genes or fragments thereof that differ in their nucleotide sequence from one or more pseudogenes of the one or more pharmacogenomic genes.

[0015] In some embodiments, the one or more regions of the one or more pharmacogenomic genes or fragments thereof share at least 99%, 98%, 97%, 96%, 95%, 94%, 93%, 92%, 91%, or 90% identity in its nucleic acid sequence with the corresponding one or more pseudogenes or fragments thereof.

[0016] In some embodiments, detecting hybridization comprises single-base extension (SBE), allele-specific primer extension (ASPE), or both SBE and ASPE.

[0017] In some embodiments, amplifying comprises a PCR reaction with a dNTP mixture comprising dATP, dTTP, dGTP, dCTP, and dUTP and a dUTP incorporating polymerase.

[0018] In some embodiments, fragmenting comprises incubating with uracil DNA glycosylase (UDG).

[0019] Also described herein are methods of selecting a drug treatment for a patient in need thereof, including: identifying a patient in need of a drug treatment; determining, or having determined, the genotype of pharmacogenomic marker(s) according to any of the methods described herein; and based on said genotyping, selecting a drug treatment for the patient.

[0020] In some embodiments, selecting a drug treatment for the patient comprises determining that a drug is suitable for administration to the patient by identifying one or more drug interactions with the genotype of one or more the pharmacogenomic markers, and, optionally, administering a drug with a positive treatment outcome associated with one or more of the genotypes of the one or more pharmacogenomic markers and/or not administering a drug with a negative treatment outcome associated with one or more of the genotypes of the one or more pharmacogenomic markers.

[0021] In some embodiments, selecting a drug treatment includes determining that a drug is not suitable for administration to the patient and, optionally, not administering the drug.

[0022] Also described herein are array compositions comprising: a solid surface; and one or more nucleic acids selected from the group consisting of nucleic acids comprising or consisting of the sequences of SEQ ID NOS: 22-2217, wherein the one or more nucleic acids are bound to the solid surface.

[0023] In some embodiments, the array composition comprises: (i) at least 100 nucleic acids selected from the group consisting of nucleic acids comprising or consisting of the sequences of SEQ ID NOS: 22-2217; or (ii) at least 500 nucleic acids selected from the group consisting of nucleic acids comprising or consisting of the sequences of SEQ ID NOS: 22-2217; (iii) at least 1000 nucleic acids selected from the group consisting of nucleic acids comprising or consisting of the sequences of SEQ ID NOS: 22-2217; or (iv) at least 1500 nucleic acids selected from the group consisting of nucleic acids comprising or consisting of the sequences of SEQ ID NOS: 22-2217.

[0024] Also described herein are methods of amplifying a target nucleic acid by polymerase chain reaction comprising contacting the target nucleic acid with a composition comprising one or more nucleic acids selected from the group of nucleic acids comprising or consisting of SEQ ID NOS: 4-19 and a polymerase.

[0025] In some embodiments, the composition comprises nucleic acids comprising or consisting of: (i) SEQ ID NO:4 and SEQ ID NO:5; (ii) SEQ ID NO:6 and SEQ ID NO:7; (iii) SEQ ID NO: 8 and SEQ ID NO:9; (iv) SEQ ID NO:10 and SEQ ID NO:11; (v) SEQ ID NO:12 and SEQ ID NO: 13; (vi) SEQ ID NO:14 and SEQ ID NO:15; (vii) SEQ ID NO:16 and SEQ ID NO:17; and/or (viii) SEQ ID NO:18 and SEQ ID NO:19.

[0026] In some embodiments, the composition comprises oligonucleotides comprising or consisting of the sequences of SEQ ID NOS: 4, 5, 6, 7, 8, 9, 10, 11, 12, 13, 14, 15, 16, 17, 18, and 19.

[0027] Also described herein are compositions comprising one or more nucleic acids selected from the group of nucleic acids comprising or consisting of SEQ ID NOs: 4-19, a polymerase, and a target nucleic acid.

[0028] Also described herein are kits comprising a composition comprising nucleic acids comprising or consisting of: (i) SEQ ID NO:4 and SEQ ID NO:5; (ii) SEQ ID NO:6 and SEQ ID NO: 7; (iii) SEQ ID NO:8 and SEQ ID NO:9; (iv) SEQ ID NO:10 and SEQ ID NO:11; (v) SEQ ID NO: 12 and SEQ ID NO:13; (vi) SEQ ID NO: 14 and SEQ ID NO:15; (vii) SEQ ID NO:16 and SEQ ID NO:17; and/or (viii) SEQ ID NO: 18 and SEQ ID NO:19.

[0029] In some embodiments, the kit further comprises a dNTP mixture and a polymerase.

[0030] In some embodiments, the dNTP mixture comprises dUTP and the polymerase is a dUTP incorporating polymerase.

[0031] In some embodiments, the kit further comprises uracil DNA nucleotide glycosylase.

[0032] In some embodiments, the kit further comprises an array composition described herein.

[0033] In some embodiments, the kit further comprises random oligonucleotides for WGA.

[0034] As used herein, the term “pharmacogenomic marker” refers to a genetic variant, such as a single nucleotide variant (SNV) or copy number variant (CNV) in a gene associated with drug metabolism.

[0035] As used herein, the term “pharmacogenomic gene” refers to a gene associated with drug metabolism.

[0036] As used herein, the term “fragmenting” in the context of fragmenting nucleic acid(s) refers to the process of breaking down a nucleic acid into units of shorter lengths.

[0037] As used herein, the term “whole genome amplification” (WGA) refers to a process by which a starting amount of nucleic acid (e.g., genomic DNA) is amplified, with all regions of the genome targeted for amplification. An example of such a process is multi displacement amplification (MDA).

[0038] As used herein, the term “targeted gene amplification” (TGA) refers to a process in which particular nucleic acids (e.g., target genomic regions) are isolated and amplified (for example, by PCR).

[0039] As used herein, the term “genotyping” refers to determining a genetic constitution of an individual at a genomic locus. For example, genotyping includes determining the genetic constitution of the alleles present a genomic locus (e.g., alleles at a SNV locus) and/or the number of copies of a gene or allele at a genomic locus.

[0040] By leveraging pharmacogenomics technologies, healthcare providers will ultimately be able to maximize the intended use of a medication or treatment, reduce adverse drug reactions, speed time to achieving the therapeutic benefit of a drug, decrease the chance of side effects or dependency, and decrease the cost of healthcare expenditures. For example, costs can be reduced by using the methods described herein to identify the most appropriate and affordable drug the first time, by reducing adverse drug reactions early in treatment, and thus reducing hospital length of stays, reducing hospital readmissions, and reducing ER visits.

[0041] Throughout this application, various embodiments may be presented in a range format. It should be understood that the description in a range format is merely for convenience and brevity and should not be construed as an inflexible limitation on the scope of the disclosure. Accordingly, the description of a range should be considered to have specifically disclosed all the possible subranges as well as individual numerical values within that range. For example, description of a range such as from 1 to 6 should be considered to have specifically disclosed subranges such as from 1 to 3, from 1 to 4, from 1 to 5, from 2 to 4, from 2 to 6, from 3 to 6 etc., as well as individual numbers within that range, for example, 1, 2, 3, 4, 5, and 6. This applies regardless of the breadth of the range.

[0042] As used in the specification and claims, the singular forms “a”, “an” and “the” include plural references unless the context clearly dictates otherwise. For example, the term “a sample” includes a plurality of samples, including mixtures thereof.

[0043] The terms “determining,” “measuring,” “evaluating,” “assessing,” “assaying,” and “analyzing” are often used interchangeably herein to refer to forms of measurement. The terms include determining if an element is present or not (for example, detection). These terms can include quantitative, qualitative or quantitative and qualitative determinations. Assessing can be relative or absolute. “Detecting the presence of” can include determining the amount of something present in addition to determining whether it is present or absent depending on the context.

[0044] As used herein, the term “about” a number refers to that number plus or minus 10% of that number. The term “about” a range refers to that range minus 10% of its lowest value and plus 10% of its greatest value.

[0045] Unless otherwise defined, all technical and scientific terms used herein have the same meaning as commonly understood by one of ordinary skill in the art to which this invention belongs. Methods and materials are described herein for use in the present invention; other, suitable methods and materials known in the art can also be used. The materials, methods, and examples are illustrative only and not intended to be limiting. All publications, patent applications, patents, sequences, database entries, and other references mentioned herein are incorporated by reference in their entirety. In case of conflict, the present specification, including definitions, will control.

[0046] Other features and advantages of the invention will be apparent from the following detailed description and figures, and from the claims.

### DESCRIPTION OF DRAWINGS

[0047] The patent or application file contains at least one drawing executed in color. Copies of this patent or patent application publication with color drawing(s) will be provided by the Office upon request and payment of the necessary fee.

[0048] FIG. 1 is a flowchart that shows one example of an Infinium® assay workflow that incorporates targeted gene amplification (TGA).

[0049] FIG. 2A is a schematic diagram that shows an exemplary Infinium® assay workflow.

[0050] FIG. 2B is a flowchart that shows one example of an Infinium® assay workflow.

[0051] FIGS. 3A-3C are a series of flow charts that show an overview of a three-day workflow for PGx genotyping using the Infinium® Global Diversity Array with Enhanced PGx. Day 1: FIG. 3A; Day 2: FIG. 3B; Day 3: FIG. 3C.

[0052] FIGS. 4A and 4B are graphic representations of results for design verification testing runs of Infinium® with PGx content enabled. FIG. 4A: Call Rate passes acceptance criteria of ≥99.5% of probes receiving a call indicating high quality and reproducible data generated from the PGx with TGA workflow; FIG. 4B: Log R Dev, a metric comparing test signal to reference signal, passes acceptance criteria of >0.200, indicating low noise in the data.

[0053] FIG. 5 is a bar graph showing concordance of PGx variants covered by the PCR module in the Infinium® workflow with PGx content enabled.

[0054] FIG. 6 is a series of plots showing concordance of regions of CYP2D6 with and without amplicon coverage. In the top row, signal from WGA alone is shown for regions of CYP2D6 containing key PGx variants, and colored by the genotype taken from 1000 Genomes reference data. Overlap of genotype clusters results from interference from pseudogenes generating noise in these regions, leading to inaccurate genotyping calls. Noise shifts cluster over one another, yielding a suppressed Call Rate of 80.1%. In the bottom row, TGA is included in the workflow as described herein, and amplicons from the regions are present in large molar excess over background WGA DNA. This approach leads to genotyping of the on-target amplicons, and minimization of signal from WGA, yielding distinct clusters and a high Call Rate of 99.3%.

[0055] FIGS. 7A and 7B are graphs that show that suboptimal NaOH levels decrease CNV (high % GC) probe intensity. The two graphs show normalized signal intensity (FIG. 7A) and Log R Mean v. NaOH molarity (FIG. 7B) for low [OH] v. High [OH] for 1399 CYP2D6 probes.

[0056] FIGS. 8A and 8B are a pair of graphs that show higher [OH] increases signal stability, leading to guard-banded CNV calling capability for the CYP2D6 SNP caller. Nominal signal intensity (FIG. 8A; dashed lines, from top to bottom: 95%, 90%, 85%; bars, from left to right, CYP2D6.intron.2_acc, CYP2D6.p5_acc, CYP2D6.exon.9_acc) and Log R Mean (FIG. 8B).

[0057] FIG. 9 is a plot of results from using a probe that shows high levels of noise in the control (WGA only, Control) evidenced by a theta value far from any canonical cluster (0, 0.5, or 1), is inhibited in the presence of multiplex PCR-amplified material that does not contain uracil (WGA+mPCR, “mPCR”), and yields an AB call at the canonical cluster position in the presence of uracil-containing multiplex PCR (mUPCR+WGA, “mUPCR”), demonstrating rescue of an inhibited probe via uracil incorporation of target amplicons during PCR and subsequent fragmentation.

### DETAILED DESCRIPTION

[0058] Provided herein are methods and compositions for genotyping. The methods and compositions described herein are useful, for example, for determining the genotype of a pharmacogene (PGx gene) (see, e.g., Katara and Yadav, “Pharmacogenes (PGx-genes): Current Understanding and Future Directions,” Gene 718:144050 (2019)) and, for example, selecting a treatment based on the genotype.

[0059] The methods described herein include, for example, genotyping one or more pharmacogenomic markers, which are described in more detail below. In some cases, the genotyping includes a target enrichment step, which is also described in more detail below. In some cases, the target enrichment includes PCR amplification that incorporates dUTP into the amplification product, and, in, thus, in some cases, fragmentation includes Uracil-DNA Glycosylase (UDG) digestion.

[0060] PGx marker genotypes are useful, for example, for selecting treatments suitable for administration (e.g., which are expected to be well-tolerated based on genotype). Thus, also described herein are methods for selecting drug treatment(s) for patient(s).

[0061] The compositions described herein include, for example, compositions comprising PCR primers for targeted enrichment and/or whole genome amplification, as well as probes for capture of, for example, PGx genes, and arrays to which the probes are bound. The compositions, in some cases, are provided as part of a kit.

### Pharmacogenomic Markers

[0062] The study of genetically influenced variations in drug response and adverse drug reactions (ADRs) is known as pharmacogenomics (PGx). See, e.g., Arbitrio et al., “Pharmacogenomic Profiling of ADME Gene Variants: Current Challenges and Validation Perspectives,” High Throughput 7 (4): 40 (2018). Polymorphic variants in genes related to drug absorption, distribution, metabolism, and excretion (ADME) contribute to variability amongst individuals in drug efficacy and adverse effects. Id. Identification of PGx markers, therefore, enables optimization of treatment based on an individual's genotype.

[0063] Genetic variants of PGx genes can be referred to at the allele level, for example by star allele nomenclature (see, e.g., Kalman et al., “Pharmacogenetic Allele Nomenclature: International Workgroup Recommendations for Test Result Reporting, Clin. Pharmacol. Ther. 99 (2): 172-85 (2016)) and/or Human Genome Variation Society (HGVS) nomenclature (see den Dunnen et al., “HGVS Recommendations for the Description of Sequence Variants: 2016 Update,” Human Mutation, 37 (6): 654-9 (2016)). Genetic variants of PGx genes can also be referred to at the nucleotide level, for example by HGVS nomenclature. A variant allele can comprise a series of variants at the nucleotide level.

[0064] Thus, in some instances, the pharmacogenomics marker is an allele of a PGx gene. In some instances, the pharmacogenomics marker is a mutation in a PGx gene at the nucleic and/or amino acid level, relative to a reference sequence. In some instances, the reference sequence is a reference genome. In some instances, the reference sequence is a wild-type allele.

[0065] In some instances, the mutation is selected from the group consisting of a substitution, a deletion, an insertion, a duplication, an inversion, a deletion-insertion, a repeat, and combinations thereof. In some instances, the mutation is a single nucleotide variant (SNV) (e.g., a single base substitution). In some instances, the mutation is a copy number variant (CNV).

[0066] In some instances, the pharmacogenomics gene is selected from the group consisting of ABCB1, ABCC4, ABCG2, ACE, ALDH1A1, ALK, BCKDK, BCR, BRAF, C8orf34, CACNA1S, CES1, CFTR, CHRNA3, COL22A1, COQ2, CRHR1, CYP19A1, CYP21A2, CYP2A6, CYP2A7P1, CYP2B6, CYP2C19, CYP2C8, CYP2C9, CYP2D6, CYP2E1, CYP3A, CYP3A5, CYP4F2, DPYD, DYNC2H1, EGFR, EPHX1, ERBB2, F5, FCGR3A, FKBP5, G6PD, GGCX, GSTM1, GSTT1, HCP5, HLA-A, HLA-B, HLA-C, HLA-DPB1, HLA-DQA1, HLA-DRB1, HMGCR, IFNL3, IFNL4, KCNIP4, KIF6, KIT, LPA, MTRR, NEDD4L, NQO1, NUDT15, OPRM1, POLG, POR, PRKCA, PRSS53, PSORS1C1, PTGFR, RYR1, SCN1A, SCN5A, SEMA3C, SLC19A1, SLC28A3, SLC6A4, SLCO1B1, SLCO1B3, SOD2, SULT1A1, TANC1, TBXAS1, TMEM43, TPMT, TXNRD2, TYMS, UGT1A1, UGT1A4, UGT1A5, UGT2B17, UGT2B28, VDR, VKORC1, YEATS4, ZNRD1-AS1, and combinations thereof.

[0067] In some instances, the pharmacogenomics gene is selected from the group consisting of BCKDK, CACNA1S, CFTR, CYP2A7P1, CYP2B6, CYP2B6, CYP2C19, CYP2C9, CYP2D6, CYP3A, CYP3A5, CYP4F2, DPYD, F5, G6PD, HCP5, HLA-A, IFNL3, NUDT15, PRSS53, PSORS1C1, RYR1, SLCO1B1, TPMT, UGT1A1, VKORC1, ZNRD1-AS1, and combinations thereof, and the pharmacogenomics marker is a SNV. Representative SNV pharmacogenomics markers are set forth in Table 9, below.

[0068] In some instances, the pharmacogenomics is selected from the group consisting of ABCB1, ABCC4, ABCG2, ACE, ALDH1A1, ALK, BCR, BRAF, C8orf34, CACNA1S, CES1, CFTR, CHRNA3, COL22A1, COQ2, CRHR1, CYP19A1, CYP21A2, CYP2A6, CYP2B6, CYP2C19, CYP2C8, CYP2C9, CYP2D6, CYP2E1, CYP3A5, CYP4F2, DPYD, DYNC2H1, EGFR, EPHX1, ERBB2, F5, FCGR3A, FKBP5, G6PD, GGCX, GSTM1, GSTT1, HLA-A, HLA-B, HLA-C, HLA-DPB1, HLA-DQA1, HLA-DRB1, HMGCR, IFNL3, IFNL4, KCNIP4, KIF6, KIT, LPA, MTRR, NEDD4L, NQO1, NUDT15, OPRM1, POLG, POR, PRKCA, PTGFR, RYR1, SCN1A, SCN5A, SEMA3C, SLC19A1, SLC28A3, SLC6A4, SLCO1B1, SLCO1B3, SOD2, SULT1A1, TANC1, TBXAS1, TMEM43, TPMT, TXNRD2, TYMS, UGT1A1, UGT1A4, UGT2B17, UGT2B28, VDR, VKORC1, YEATS4, and combinations thereof, and the pharmacogenomic marker is a copy number variation (CNV).

### Genotyping Pharmacogenomic Markers

### Target Enrichment

[0069] The methods described herein can include enrichment, e.g., of a pharmacogenomic marker. In some instances, enrichment comprises targeted amplification of a high homology region, for example, a PGx gene or fragment thereof.

[0070] In some instances, the PGx gene is selected from the group consisting of CYP2D6 (NCBI Gene ID: 1565; SEQ ID NO: 1), CYP2B6 (NCBI Gene ID: 1555; SEQ ID NO: 2), and TPMT (NCBI Gene ID: 7172; SEQ ID NO: 3), and combinations thereof.

[0071] In some instances, the enrichment comprises targeted amplification of one or more particular exon(s) of a PGx gene or fragment thereof.

[0072] In some instances, the particular exon(s) of the PGx gene or fragment thereof is selected from the group consisting of CYP2D6 Exon 1 (E1), CYP2D6 Exon 2 (E2), CYP2D6 Exon 3 (E3), CYP2D6 Exon 4 (E4), CYP2D6 Exon 5 (E5), CYP2D6 Exon 6 (E6), CYP2D6 Exon 7 (E7), CYP2D6 Exon 8 (E8), CYP2D6 Exon 8 (E9), CYP2B6 Exon 1 (E1), CYP2B6 Exon 2 (E2), CYP2B6 Exon 3 (E3), CYP2B6 Exon 4 (E4), CYP2B6 Exon 5 (E5), CYP2B6 Exon 6 (E6), CYP2B6 Exon 7 (E7), CYP2B6 Exon 8 (E8), CYP2B6 Exon 8 (E9), and combinations thereof.

[0073] The locations of the exons for CYP2D6 and CYP2B6, with respect to SEQ ID NO: 1 and SEQ ID NO: 2, respectively are shown below in the sequences section, are indicated in Table 1.

TABLE 1
PGx Gene Exons

| Gene | Exon | Location |
|---|---|---|
| CYP2D6 | 1 | 1 . . . 199 |
| CYP2D6 | 2 | 902 . . . 1073 |
| CYP2D6 | 3 | 1626 . . . 1778 |
| CYP2D6 | 4 | 1867 . . . 2027 |
| CYP2D6 | 5 | 2461 . . . 2637 |
| CYP2D6 | 6 | 2828 . . . 2969 |
| CYP2D6 | 7 | 3177 . . . 3364 |
| CYP2D6 | 8 | 3819 . . . 3960 |
| CYP2D6 | 9 | 4059 . . . 4312 |
| CYP2B6 | 1 | 1 . . . 195 |
| CYP2B6 | 2 | 12720 . . . 12882 |
| CYP2B6 | 3 | 13016 . . . 13165 |
| CYP2B6 | 4 | 15624 . . . 15784 |
| CYP2B6 | 5 | 17938 . . . 18114 |
| CYP2B6 | 6 | 18713 . . . 18854 |
| CYP2B6 | 7 | 21017 . . . 21204 |
| CYP2B6 | 8 | 21393 . . . 21534 |
| CYP2B6 | 9 | 25365 . . . 27117 |

[0074] In some instances, the amplified portion of the PGx gene or fragment thereof shares 99% or more, e.g., at least 98%, 97%, 96%, 95%, 94%, 93%, 92%, 91%, or 90% identity with a related pseudogene.

[0075] In some instances the PGx gene is CYP2D6 and the related pseudogene is cytochrome P450, subfamily IID, polypeptide 7b pseudogene (CYP2D7BP; NCBI Gene ID 1566), cytochrome P450 family 2 subfamily D member 6 pseudogene (LOC101929829; NCBI Gene ID 10929829), or cytochrome P450 family 2 subfamily D member 8 pseudogene (CYP2D8P; NCBI Gene ID 1568).

[0076] In some instances the PGx gene is CYP2B6 and the related pseudogene is cytochrome P450 family 2 subfamily member 7 pseudogene (CYP2B7; NCBI Gene ID 1556)

[0077] In some instances the PGx gene is TPMT and the related pseudogene is thiopurine S-methyltransferase pseudogene 1 (TPMTP1; NCBI Gene ID 400650), thiopurine S-methyltransferase pseudogene 2 (TMPTP2; NCBI Gene ID 100420393), thiopurine S-methyltransferase pseudogene 3 (TMPTP3; NCBI Gene ID 100129277), or thiopurine S-methyltransferase pseudogene 4 (TMPTP4; NCBI Gene ID 100129298).

[0078] Representative PCR primers for amplification of PGx genes or fragments thereof are shown in Table 22. Thus, provided herein are nucleic acid sequences comprising or consisting of any one or more of SEQ ID NOs: 4-19.

TABLE 2
PGx Gene PCR Primers

| | Primer | | Primer Sequence | SEQ ID |
|---|---|---|---|---|
| Target | Pair | Primer ID | (5′→3′) | NO: |
| CYP2D6 E1 | 1 | CYP2D6 E1 F | CAGAGGAGCCCATTTGGTAGT | 4 |
| CYP2D6 E1 | 1 | CYP2D6 E1 R | CCAGCCTGTGGTTTCACC | 5 |
| CYP2D6 E2 | 2 | CYP2D6 E2 F | GGACTACGGTCATCACCCA | 6 |
| CYP2D6 E2 | 2 | CYP2D6 E2 R | GCTTGACAAGAGGCCCTG | 7 |
| CYP2D6 E3-4 | 3 | CYP2D6 E3-4 F | GGCTAATGCCTTCATGGCC | 8 |
| CYP2D6 E3-4 | 3 | CYP2D6 E3-4 R | GCAAATCCTGCTCTTCCG | 9 |
| CYP2D6 E5-6 | 4 | CYP2D6 E5-6 F | GTACCTCCTATCCACGTCAGAGA | 10 |
| CYP2D6 E5-6 | 4 | CYP2D6 E5-6 R | CATCCCGGCAGAGAACAG | 11 |
| CYP2D6 E7 | 5 | CYP2D6 E7 F | CCTGACCTCCTCCAACATAGG | 12 |
| CYP2D6 E7 | 5 | CYP2D6 E7 R | CACCCAAGTGGGGACAGT | 13 |
| CYP2B6 E1 | 6 | CYP2B6 E1 F | CTTCCCCAAGTACCAAGGCA | 14 |
| CYP2B6 E1 | 6 | CYP2B6 E1 R | GACATACATATACCCACAAACCCACAC | 15 |
| CYP2B6 E10 | 7 | CYP2B6 E10 F | ACTCCTGCACTCACTTGCAA | 16 |
| CYP2B6 E10 | 7 | CYP2B6 E10 R | AATCTGTTGCAGTGGACATTTG | 17 |
| TPMT F | 8 | TPMT F | TGAAGTACCAGCATGCACC | 18 |
| TPMT R | 8 | TPMT R | GAGCCACAAGCCTTATAGCC | 19 |

[0079] In some instances, enrichment of multiple pharmacogenomics markers is carried out simultaneously, e.g., by multiplex PCR. In some instances, the multiplex PCR is carried out using a mixture of primers. In some instances, the multiplex PCR is carried out using a mixture of primers, e.g., a mixture of one or more primers pairs shown in Table 2, e.g., at least 2, e.g., at least 3, 4, 5, 6, 7, or 8 primer pairs shown in Table 2.

[0080] Thus, provided herein are compositions comprising one or more nucleic acid sequences comprising or consisting of one or more of SEQ ID NOs: 4-19, e.g., at least 2, e.g., at least 3, 4, 5, 6, 7, 8, 9, 10, 11, 12, 13, 14, 15, or 16 of SEQ ID NOS: 4-19, e.g., one or more of the primer pairs shown in Table 2, e.g., at least 2, e.g., at least 3, 4, 5 6, 7, or 8 of the primer pairs show in Table 2. In some instances, the composition comprises nucleic acid sequences comprising or consisting of each of SEQ ID NOs: 4-19. In some instances, the composition is a non-naturally occurring composition.

[0081] In some instances, the concentration of each of the one or more nucleic acid sequences in the composition is a value from 0.1 μM to 1.0 μM. In some instances, the concentration of each of the one or more nucleic acid sequences in the composition is, independently, about 0.25 μM, about 0.5 μM, or about 0.75 μM.

[0082] Useful concentrations for each primer both in the PCR reaction mixture and the primer mixture are also shown in Table 3. In some instances, the concentration of the one or more nucleic acid sequences is as shown in Table 3, or about the concentration shown in Table 3.

TABLE 3
Multiplex PCR Primer Mixture

| | | Exemplary | | Exemplary | |
|---|---|---|---|---|---|
| Primer | Primer | Concentration | | Concentration in | |
| Pair | ID | in Rxn | | Primer Mixture | |
| 1 | CYP2D6 E1 F | 0.100 | μM | 0.25 | μM |
| 1 | CYP2D6 E1 R | 0.100 | μM | 0.25 | μM |
| 2 | CYP2D6 E2 F | 0.100 | μM | 0.25 | μM |
| 2 | CYP2D6 E2 R | 0.100 | μM | 0.25 | μM |
| 3 | CYP2D6 E3-4 F | 0.300 | μM | 0.75 | μM |
| 3 | CYP2D6 E3-4 R | 0.300 | μM | 0.75 | μM |
| 4 | CYP2D6 E5-6 F | 0.200 | μM | 0.5 | μM |
| 4 | CYP2D6 E5-6 R | 0.200 | μM | 0.5 | μM |
| 5 | CYP2D6 E7 F | 0.200 | μM | 0.5 | μM |
| 5 | CYP2D6 E7 R | 0.200 | μM | 0.5 | μM |
| 6 | CYP2B6 E1 F | 0.100 | μM | 0.25 | μM |
| 6 | CYP2B6 E1 R | 0.100 | μM | 0.25 | μM |
| 7 | CYP2B6 E10 F | 0.100 | μM | 0.25 | μM |
| 7 | CYP2B6 E10 R | 0.100 | μM | 0.25 | μM |
| 8 | TPMT F | 0.100 | μM | 0.25 | μM |
| 8 | TPMT R | 0.100 | μM | 0.25 | μM |

[0083] In some instances, the mixture of primers further comprises a primer pair that amplifies a known sequence, as a positive control. For example, the primer pair Lambda F (GCTGACGTTACTGACGTGGT; SEQ ID NO:20) and Lambda R (CAGGCGGCCTTTAGTGATGA; SEQ ID NO:21) can be added to the primer mixture to be used as positive controls, e.g., at 0.025 μM in the reaction and 0.0625 μM in the primer mixture. In this case, Lambda Template DNA is added to the PCR reaction and detection of amplified Lambda DNA serves as a positive control. Thus, in some instances, Lambda Template dsDNA (10 ng/μL) is added, e.g., at or at about 16 ng/μL to the reaction, or 40 pg/μL to the primer mixture.

[0084] In some instances, the PCR is carried out using dNTP(s). In some cases, the dNTP(s) are selected from the group consisting of dATP, dTTP, dGTP, dCTP, and combinations thereof. In some cases, the dNTP(s) are selected from the group consisting of dATP, dTTP, dGTP, dCTP, dUTP, and combinations thereof.

[0085] An example of a genotyping method that incorporates enrichment of a pharmacogenomics marker (in this case, targeted gene amplification, “TGA”) is shown in FIG. 1. FIG. 1 is a flowchart that shows one example of an Infinium® assay workflow that incorporates targeted gene amplification (TGA). In this example, pre-library prep is carried out by providing a nucleic acid sample (e.g., a genomic DNA sample), and then carrying out TGA and whole genome amplification (WGA) on the sample in parallel to create a TGA sample and WGA sample.

[0086] In this example, for WGA, sodium hydroxide (NaOH) is placed under a layer of mineral oil to prevent acidification and evaporation. The DNA sample is added to NaOH and allowed to incubate for 10 minutes to denature it, followed by addition of random 9-mer oligos, polymerase, dNTPs including dUTP, and other buffer components. During incubation, random oligos bind the single-stranded DNA, which are then extended by the polymerase. A strand-displacing polymerase is used, and as DNA is displaced and made single-stranded, random oligos bind those, and the process continues until limiting components are exhausted. During this time, dUTP is incorporated into the WGA product as uracil.

[0087] During TGA, in this example, PCR occurs with primers specific to the regions of interest amplify target regions. A uracil-incorporating polymerase is selected, and dUTP is incorporated into amplicons as uracil. The TGA reaction is optimized to produce a consistent yield across DNA inputs and sample types, ensuring that a predictable and optimal amount of product DNA will be delivered onto the BeadChip® for genotyping, that any non-target product is minimized and/or does not produce inaccurate results or impede accurate copy number variation calling.

[0088] Then post-library prep in this example is carried out by recombining the TGA and WGA samples to create a combined TGA/WGA sample and then proceeding with a standard Infinium® workflow for the remainder of the post-library prep as follows: completing post-library prep by fragmenting the TGA/WGA sample, precipitating the nucleic acids of the TGA/WGA sample to produce a precipitate, re-suspending the precipitate.

[0089] The recombine step in this example, in which DNA products from the WGA and TGA processes, is optimized to ensure that the TGA amplicons consistently provide accurately genotyping signal for their regions, while WGA has enough material to provide accurate genotyping and CNV signal for other regions. After recombine, samples are incubated with uracil DNA glycosylase (UDG) to remove uracil, leaving abasic sites in products of both WGA and TGA, and are then isopropyl alcohol precipitated. Samples are then resuspended in hybridization buffer, and incubated at 95° C. to finish sample resuspension, fragment DNA at abasic sites, and denature DNA in preparation for hybridization.

[0090] Then the BeadChip® assay in this example is carried out, also using a standard Infinium® workflow, as follows: the re-suspended sample is hybridized to the BeadChip®, the BeadChip® is washed, X-stained, and imaged.

[0091] In this example, during hybridization, TGA product amplicons outcompete WGA from target regions and regions of high homology, hybridizing to target probes in much greater numbers. This leads to the majority of signal produced by these target probes in subsequent signal generation steps, and the ability to call accurate genotypes. The TGA targets are designed to leave regions open for CNV calling, where WGA signal is used to accurately call regions of interest. Hybridized BeadChips® are then washed of excess DNA, and X-Stained. During XStain, a single base extension occurs on the probe to copy variant information over from hybridized regions, WGA and TGA targets are removed, and then extended probes are differentially stained with a two dye scheme. Signal amplification occurs through layering primary and secondary antibodies. BeadChips® are washed and given a protective coating, and then imaged (scanned), yielding data to process for genotyping and CNV calling.

[0092] In this example, CNVs are called according to the methods described in US Patent Application Publication No. US2020/0381079, which is hereby incorporated by reference in its entirety

### Samples and Sample Preparation

[0093] Provided herein are methods for genotyping markers, e.g., PGx markers, in a nucleic acid sample, e.g., a DNA and/or RNA sample.

[0094] In some instances, the nucleic acid sample is a DNA sample. In some instances, the DNA sample is a genomic DNA sample. In some instances, the DNA sample is a genomic DNA sample from an individual.

[0095] In some instances, the nucleic acid sample is a RNA sample. In some instances, the RNA sample is a mRNA sample. In some instances the RNA sample is an mRNA sample from an individual.

[0096] In some instances, the individual is a subject in need of treatment. In some instances, the individual is a mammal. In some instances, the individual is a human. In some instances, the individual is a human subject in need of treatment with a drug.

[0097] In some instances, the methods include quantifying the nucleic acid sample. In some instances, the methods include adjusting the concentration of the nucleic acid sample. When, for example, WGA and TGA are carried out separately, in some cases the concentration of the portion of the nucleic acid sample used for WGA is adjusted to a first concentration prior to WGA and the portion of the nucleic acid sample used for TGA is adjusted to a second concentration prior to TGA.

[0098] In some instances, the methods include amplifying the nucleic acid sample. In some instances, amplification comprises whole genome amplification (WGA), e.g., as described herein. In some instances, amplification includes targeted gene amplification (TGA) (e.g., PCR amplification), e.g., as described herein. In some instances, amplification includes both WGA and TGA. In some instances, a first portion of the sample is amplified by WGA and a second portion of the sample is amplified by TGA. In some instances, the whole genome amplified portion of the sample and targeted amplified portion of the sample are combined after the respective amplifications.

[0099] In some instances, the nucleic acid sample is fragmented. In some instances, the nucleic acid sample is fragmented after amplification, e.g., after WGA and/or TGA.

### Whole Genome Amplification

[0100] In some instances, the genotyping methods includes an amplification step, e.g., a whole genome amplification (WGA) step. Whole genome amplification methods are known and described in the art. See, e.g., Borgstrom, “Comparison of Whole Genome Amplification Techniques for Human Single Cell Exome Sequencing,” PLOS ONE 12 (2): e0171566 (2017); see also Gonzales-Pena et al., “Accurate Genomic Variant Detection in Single Cells with Primary Template-Directed Amplification,” PNAS 118 (24): e2024176118 (2021).

[0101] In some instances, whole genome amplification comprises single cell comparative genomic hybridization (SCOMP) (e.g., AMPLI1™, Silicon Biosystems), multiple displacement amplification (MDA) (e.g., REPLI-g™, Qiagen), single-cell MDA (SCMDA), amplification with degenerate oligonucleotide primed polymerase chain reaction (DOP-PCR), displacement pre-amplification combined with PCR amplification (e.g., MALBAC®, Yikongenomics, or PicoPlex™, Rubicon Genomics), linear amplification via transposon insertion (LIANTI), primary template-directed amplification (PTA), or variations or combination thereof. See Borgstrom 2017; Gonzales-Pena et al.

[0102] In some instances, the starting amount of nucleic acid before WGA is from 1 ng to 1 μg, e.g., from 20 ng to 200 ng. In some instances, the starting amount of nucleic acid before WGA is 100 ng or about 100 ng.

[0103] Whole genome amplification can involve denaturation of double stranded nucleic acid. In some instances, denaturation is achieved using sodium hydroxide (NaOH). In some instances, the concentration of NaOH in the reaction mixture is from 0.03 M to 0.2 M, e.g., from 0.04 M to 0.16 M, e.g., from 0.044 M to 1.33 M, e.g., from 0.044 M to 0.088 M. In some cases, the concentration of NaOH in the reaction mixture is 0.044 M or about 0.044 M.

[0104] In some instances, denaturation is carried out from 5 to 60 min, e.g., from 10 to 30 min, e.g., about 30 min, e.g., about 10 min. In some instances, denaturation is carried out for less than 30 minutes.

[0105] In some instances, WGA is carried out with a random primer. In some instances, WGA is carried out with a polymerase that lacks 5′→3′ and/or 3′→5′ exonuclease activity. In some instances, the polymerase is Exo-Minus Klenow DNA Polymerase (an N-terminal truncation of DNA Polymerase with mutations D355A and E357A).

### Targeted Enrichment

[0106] The methods described herein can include enrichment of a particular target, e.g., by targeted gene amplification (TGA), e.g., as described above, instead of or in addition to whole genome amplification.

[0107] In some instances, the starting amount of nucleic acid before TGA is from 1 ng to 1 μg, e.g., from 20 ng to 200 ng. In some instances, the starting amount of nucleic acid before TGA is 100 ng or about 100 ng.

[0108] In some instances, TGA is carried out.

[0109] In some instances, WGA and TGA are carried out in parallel on different portions of the same starting nucleic acid sample, e.g., different portions of the same nucleic acid sample. In some instances, the whole genome amplified portion and the targeted gene amplification portion are recombined before hybridization to an array, e.g., before fragmentation. An example of an Infinium® assay workflow that incorporates TGA is shown in FIG. 1.

### DNA Fragmentation

[0110] In some instances, the genotyping methods include nucleic acid fragmentation. Nucleic acid fragmentation can be achieved by a number of methods known and described in the art. See, e.g., Sapojnikova et al., “A Comparison of DNA Fragmentation Methods-Applications for the Biochip Technology,” J. Biotechnol. 256:1-5 (2017).

[0111] In some instances, nucleic acid fragmentation comprises sonication, enzymatic digestion, or a combination thereof. In some instances, nucleic acid fragmentation comprises Uracil-DNA Glycosylase (UDG) digestion. See, e.g., von Wintzingerode et al., “Base-Specific Fragmentation of Amplified 16S rRNA Genes Analyzed by Mass Spectrometry: A Tool for Rapid Bacterial Identification,” PNAS 99 (10): 7039-44 (2002).

[0112] In some instances, the average size of the nucleic acid fragments after fragmentation is from about 50 to about 150 nucleotides. In some cases, the average size of the nucleic acid fragments after fragmentation is about 80 nucleotides. In some instances, the size of the nucleic acid fragments after fragmentation is from 50 to 150 nucleotides.

### Probes and Arrays

[0113] In some instances, the pharmacogenomics marker is identified by hybridization of the sample, e.g., to a probe, e.g., a probe on a microarray. In some instances, the array is a bead array.

### Probes

[0114] Thus, provided herein are PGx capture probes. In some cases, the PGx capture probe is an oligonucleotide comprising a capture domain (e.g., a nucleotide sequence) that can specifically bind (e.g., hybridize) to a target PGx analyte (e.g., PGx gene or fragment thereof) within a sample.

[0115] In some instances, the PGx capture probe binds to a PGx gene or fragment thereof selected from the group consisting of ABCB1, ABCC4, ABCG2, ACE, ALDH1A1, ALK, BCKDK, BCR, BRAF, C8orf34, CACNA1S, CES1, CFTR, CHRNA3, COL22A1, COQ2, CRHR1, CYP19A1, CYP21A2, CYP2A6, CYP2A7P1, CYP2B6, CYP2C19, CYP2C8, CYP2C9, CYP2D6, CYP2E1, CYP3A, CYP3A5, CYP4F2, DPYD, DYNC2H1, EGFR, EPHX1, ERBB2, F5, FCGR3A, FKBP5, G6PD, GGCX, GSTM1, GSTT1, HCP5, HLA-A, HLA-B, HLA-C, HLA-DPB1, HLA-DQA1, HLA-DRB1, HMGCR, IFNL3, IFNL4, KCNIP4, KIF6, KIT, LPA, MTRR, NEDD4L, NQO1, NUDT15, OPRM1, POLG, POR, PRKCA, PRSS53, PSORS1C1, PTGFR, RYR1, SCN1A, SCN5A, SEMA3C, SLC19A1, SLC28A3, SLC6A4, SLCO1B1, SLCO1B3, SOD2, SULT1A1, TANC1, TBXAS1, TMEM43, TPMT, TXNRD2, TYMS, UGT1A1, UGT1A4, UGT1A5, UGT2B17, UGT2B28, VDR, VKORC1, YEATS4, ZNRD1-AS1, and combinations thereof.

[0116] In some instances, the PGx capture probe is a PGx capture probes from Table 9, below. Also provided herein are pluralities of PGx capture probes.

[0117] In some instances, one or more, e.g., at least 2, e.g., at least 3, 4, 5, 6, 7, 8, 9 10, 20, 30, 40, 50, 60, 70, 80, 90, 100, 110, 120, 130, 140 150, 160, 170, 180, 190, 200, 210 or more PGx genes selected from the group consisting of ABCB1, ABCC4, ABCG2, ACE, ALDH1A1, ALK, BCKDK, BCR, BRAF, C8orf34, CACNA1S, CES1, CFTR, CHRNA3, COL22A1, COQ2, CRHR1, CYP19A1, CYP21A2, CYP2A6, CYP2A7P1, CYP2B6, CYP2C19, CYP2C8, CYP2C9, CYP2D6, CYP2E1, CYP3A, CYP3A5, CYP4F2, DPYD, DYNC2H1, EGFR, EPHX1, ERBB2, F5, FCGR3A, FKBP5, G6PD, GGCX, GSTM1, GSTT1, HCP5, HLA-A, HLA-B, HLA-C, HLA-DPB1, HLA-DQA1, HLA-DRB1, HMGCR, IFNL3, IFNL4, KCNIP4, KIF6, KIT, LPA, MTRR, NEDD4L, NQO1, NUDT15, OPRM1, POLG, POR, PRKCA, PRSS53, PSORS1C1, PTGFR, RYR1, SCN1A, SCN5A, SEMA3C, SLC19A1, SLC28A3, SLC6A4, SLCO1B1, SLCO1B3, SOD2, SULT1A1, TANC1, TBXAS1, TMEM43, TPMT, TXNRD2, TYMS, UGT1A1, UGT1A4, UGT1A5, UGT2B17, UGT2B28, VDR, VKORC1, YEATS4, ZNRD1-AS1, and combinations thereof, are captured by the plurality of PGx capture probes.

[0118] In some instances, the plurality of PGx capture probes comprises one or more, e.g., at least 50 60, 70 80, 90, 100, 200, 300, 400, 500, 600, 700, 800, 900, 1000, 1100, 1200, 1300, 1400, 1500, or 1600 of the PGx probes in Table 9, below.

### Arrays

[0119] Array based genotypic methods, in general, are known and described in the art. See, e.g., Ragoussis, “Genotyping Technologies for Genetic Research,” Annu. Rev. Genomics Hum. Genet. 10:117-33 (2009).

[0120] Suitable microarrays include, but are not limited to, BeadArray™ products, including, for example, GoldenGate® and Infinium® Genotyping Assays, DASL® and DirectHyb Assays. In some instances, the microarrays is an Infinium® microarray. The Infinium® BeadArray™ platform is described, for example, in Steemers and Gunderson, “Whole Genome Genotyping Technologies on the BeadArray™ Platform,” Biotechnol. J. 2:41-9 (2007). In some instances, the array utilizes allele-specific primer extension (ASPE) biochemical scoring. In some instances, the array utilizes single-base extension (SBE) biochemical scoring. See id. In some instances, the array utilizes SBE biochemical scoring in combination with ASPE dual probe design, e.g., to detect AT and GC polymorphisms.

[0121] A useful Infinium® assay workflow is shown in FIG. 2A and FIG. 2B. First, nucleic acid, e.g., genomic DNA, is amplified; then, the amplified DNA is fragmented, precipitated and resuspended, loaded on the BeadChip®, extended, stained, imaged, and analyzed. This example is carried out as described above with respect to FIG. 1, except the TGA portion of the workflow is not included.

[0122] Thus, provided herein are arrays comprising PGx capture probes, e.g., the pluralities of PGx capture probes described herein. In some instances, the array comprises a surface, e.g., beads, to which the PGx capture probes are bound. In some instances, the capture probes are bound directly to the surface. In some instances, the capture probes are bound indirectly to the surface.

[0123] In some instances, at least 10, e.g., at least 20, 30, 40, 50, 60 70, 80, 90, 100, 110, 120, 130, 140, 150, 160, 170, 180, 190, 200, 210, 220, 230, 240, 250, 260, 270, 280, 290, 300, 310, 320, 330, 340, 350, 360, 370, 380, 390, 400, 410, 420, 430, 440, 450, 460, 470, 480, 490, 500 510, 520, 530, 540, 550, 560, 570, 580, 590, or 600 pharmacogenomics markers, e.g., the PGx markers described herein, are genotyped using the same microarray.

[0124] In some instances, 10 to 600, e.g., 10 to 550, 10 to 500, 10 to 450, 10 to 400, 10 to 350, 10 to 300, 10 to 250, 10 to 200, 10 to 150, 10 to 100, 10 to 50, 50 to 600, 50 to 550, 50 to 500, 50 to 450, 50 to 400, 50 to 350, 50 to 300, 50 to 250, 50 to 200, 50 to 150, 50 to 100, 100 to 600, 100 to 550, 100 to 500, 100 to 450, 100 to 400, 100 to 350, 100 to 300, 100 to 250, 100 to 200, 100 to 150, 150 to 600, 150 to 550, 150 to 500, 150 to 450, 150 to 400, 150 to 350, 150 to 300, 150 to 250, 150 to 200, 200 to 600, 200 to 550, 200 to 500, 200 to 450, 200 to 400, 200 to 350, 200 to 300, 200 to 250, 250 to 600, 250 to 550, 250 to 500, 250 to 450, 250 to 400, 250 to 350, 250 to 300, 300 to 600, 300 to 550, 300 to 500, 300 to 450, 300 to 400, 300 to 350, 350 to 600, 350 to 550, 350 to 500, 350 to 450, 350 to 400, 400 to 600, 400 to 550, 400 to 500, 400 to 450, 450 to 600, 450 to 550, 450 to 500, 500 to 600, 500 to 550, or 550 to 600 PGx markers, e.g., the PGx markers described herein, are genotyped using the same microarray.

[0125] In some instances, the genotyping methods include single-base extension (SBE) (depicted, e.g., as step 7 of FIG. 2B and the Xstain BeadChip® step in FIG. 2B).

### Kits

[0126] Provided herein are kits comprising reagent(s) suitable for carrying out the methods described herein.

[0127] In some instances, the kit comprises PCR primer(s) for targeted gene amplification of PGx genes or fragments thereof, e.g., as described above. In some cases, the kit further comprises control primer(s) and/or oligonucleotides. In some cases, the kit comprises a composition or compositions comprising the PCR primer(s) and/or oligonucleotide(s). In some cases, the composition(s) comprising the PCR primer(s) and/or oligonucleotide(s) further comprise a buffer.

[0128] In some instances, the kit comprises one or more polymerase enzyme(s), e.g., DNA polymerase enzyme(s). In some cases, the polymerase enzyme is a dU-incorporating polymerase. In some cases the kit comprises a composition comprising the polymerase enzyme. In some cases, the composition further comprises a buffer.

[0129] In some instances, the kit comprises dNTP(s). In some cases, the dNTP(s) are selected from the group consisting of dATP, dGTP, dCTP, dTTP, and combinations thereof. In some cases, the dNTP(s) are selected from the group consisting of dATP, dGTP, dCTP, dTTP, dUTP, and combinations thereof. In some cases, the kit comprises a composition comprising the dNTP(s). In some cases, the composition comprising the dNTP(s) further comprises a buffer.

[0130] In some instances, the kit comprises a composition comprising one or more polymerase enzyme(s), e.g., as described above, and dNTP(s), e.g., as described above.

[0131] In some instances, the kit comprises a uracil DNA nucleotide glycosylase. In some cases, the kit comprises a composition comprising a uracil DNA nucleotide glycosylase. In some cases, the composition further comprises a buffer.

[0132] In some instances, the kit comprises random oligonucleotide(s), e.g., for WGA. In some cases, the kit comprises a composition comprising random oligonucleotide(s), e.g., for WGA. In some cases, the composition further comprises a buffer.

[0133] In some instances, the kit comprises salt(s) and/or buffer(s) for DNA precipitation.

[0134] In some instances, the kit comprises control oligonucleotide(s) and/or buffer(s) for DNA resuspension.

[0135] In some instances, the kit comprises protein(s) and/or buffer(s) for washing the DNA BeadChip® surface.

[0136] In some instances, the kit comprises protein(s) and/or buffer(s) for buffer exchange.

[0137] In some instances, the kit comprises labeled ddNTP(s).

[0138] In some instances, the kit comprises binding molecule(s), e.g., antibodie(s) that bind to ddNTP(s).

[0139] In some instances, the kit comprises binding molecule(s), e.g., antibodie(s) that bind to the binding molecule(s) that bind to ddNTPs. In some cases, the antibodie(s) are labeled.

### Treatment Selection

[0140] Provided herein are methods for selecting a drug treatment for a subject in need thereof.

[0141] In some cases, the methods include obtaining a genotype of a PGx gene for the subject, e.g., a PGx gene described herein, e.g., by any of the methods described herein, and, based on the genotype, selecting a drug treatment for a subject in need thereof.

[0142] In some instances, selecting a drug treatment includes determining that a drug is suitable for administration to the patient. In some instances, selecting a drug treatment includes determining that a drug is not suitable for administration to the patient and, in some instances, determining that an alternate drug is more suitable for administration to the patient. In some instances, selecting a drug treatment includes identifying a genotype-drug response interaction, and, based on the identified interaction, selecting a drug treatment for the patient.

[0143] In some cases, identifying a genotype-drug response interaction includes querying a database, such as PharmGKB, to identify the genotype-drug response interaction. In some cases, a genotype-drug response interaction includes consulting guidelines on genotype and drug selection from organizations such as: the Clinical Pharmacogenetic Implementation Consortium (CPIC) (a collaborator of PharmGKB), the Dutch Pharmacogenetics Working Group (DPWG), the Canadian Pharmacogenomics Network for Drug Safety (CPNDS), or other groups. In some instances, a genotype-drug response interaction is identified by pharmacogenomic prescribing recommendations found in publications. In some instances, a genotype-drug response interaction is identified by an algorithm.

[0144] In some cases, the genotype-drug response interaction is a positive interaction. That is, the genotype, e.g., the genotype of a PGx marker, e.g., a PGx marker described herein, is associated with a positive treatment outcome using a drug. Thus, in some cases, selecting a drug treatment includes identifying a genotype associated with a positive treatment outcome to a drug, and administering that drug to the patient.

[0145] In some cases, the genotype-drug responses interaction is a negative interaction. That is, the genotype is associated with a negative treatment outcome using a drug. Thus, in some cases, selecting a drug treatment includes identifying a genotype associated with a negative treatment outcome to a drug, and not administering that drug to the patient and/or administering a different drug to the patient.

[0146] In some instances, the drug is selected from the group consisting of abacavir, allopurinol, amikacin, amitriptyline, atazanavir, atomoxetine, azathioprine, capecitabine, carbamazepine, celecoxib, citalopram, clopidogrel, codeine, desflurane, efavirenz, enflurane, escitalopram, fluorouracil, flurbiprofen, fosphenytoin, gentamicin, halothane, ibuprofen, irinotecan, isoflurane, ivacaftor, kanamycin, lansoprazole, lornoxicam, meloxicam, mercaptopurine, methoxyflurane, nortriptyline, omeprazole, ondansetron, oxcarbazepine, pantoprazole, paromomycin, paroxetine, peginterferon alfa-2a, peginterferon alfa-2b, phenytoin, piroxicam, pitolisant, plazomicin, rasburicase, sevoflurane, simvastatin, siponimod, streptomycin, succinylcholine, tacrolimus, tafenoquine, tamoxifen, tenoxicam, thioguanine, tobramycin, tramadol, tropisetron, voriconazole, warfarin, aspirin, divalproex sodium, eliglustat, hydralazine, oliceridine, pimozide, tetrabenazine, valproic acid, velaglucerase alfa, venlafaxine, vortioxetine, acenocoumarol, aripiprazole, belinostat, brivaracetam, carglumic acid, chloramphenicol, chlorpropamide, ciprofloxacin, clomipramine, dapsone, desipramine, dexlansoprazole, dimercaprol, doxepin, fluvoxamine, glibenclamide, glimepiride, glipizide, hydrocodone, imipramine, mafenide, mesalazine, methadone, methylene blue, moxifloxacin, mycophenolic acid, nalidixic acid, nitrofurantoin, norfloxacin, pegloticase, phenazopyridine, phenprocoumon, primaquine, probenecid, quinine, risperidone, rosuvastatin, sertraline, sodium nitrite, sulfacetamide, sulfadiazine, sulfamethoxazole/trimethoprim, sulfasalazine, sulfisoxazole, trimipramine, amifampridine, amifampridine phosphate, amoxapine, amphetamine, aripiprazole lauroxil, atenolol, avatrombopag, brexpiprazole, bucindolol, bupropion, carisoprodol, carvedilol, cevimeline, clobazam, clozapine, dabrafenib, daunorubicin, deutetrabenazine, dextromethorphan, diazepam, dolutegravir, donepezil, doxorubicin, dronabinol, elagolix, erdafitinib, flecainide, gefitinib, haloperidol, hydroxychloroquine, iloperidone, labetalol, lapatinib, lesinurad, lidocaine, 1-methylfolate, lofexidine, meclizine, metoclopramide, metoprolol, mirabegron, mirtazapine, mivacurium, nebivolol, nevirapine, nilotinib, pazopanib, perphenazine, procainamide, propafenone, propranolol, protriptyline, raltegravir, tamsulosin, thioridazine, timolol, valbenazine, zuclopenthixol, aceclofenac, adalimumab, alfentanil, amisulpride, ataluren, buprenorphine, carbimazole, carboplatin, chloroquine, cyclosporine, darifenacin, diclofenac, digoxin, dolasetron, duloxetine, eltrombopag, esomeprazole, etanercept, fentanyl, fesoterodine, flibanserin, fluoxetine, galantamine, hormonal contraceptives for systemic use, hydromorphone, indomethacin, infliximab, isoniazid, levomethadone, lumiracoxib, methazolamide, methimazole, methotrexate, methylphenidate, modafinil, morphine, nabumetone, naloxone, naltrexone, naproxen, olanzapine, oxycodone, paliperidone, palonosetron, pravastatin, propylthiouracil, quetiapine, quinidine, rabeprazole, remifentanil, rosiglitazone, sirolimus, sufentanil, tegafur, terbinafine, tolterodine, vitamin c, ziprasidone, interferon alfa-2b, recombinant, midazolam, nicotine, oxazepam, alendronate, atorvastatin, budesonide, caffeine, captopril, cerivastatin, cetuximab, cisplatin, cyclophosphamide, epirubicin, etoposide, fluticasone propionate, fluticasone/salmeterol, fluvastatin, furosemide, gemcitabine, hydrochlorothiazide, idarubicin, lamotrigine, latanoprost, metformin, oxaliplatin, raloxifene, ribavirin, risedronate, rituximab, salbutamol, salmeterol, sildenafil, spironolactone, tenofovir, triamcinolone, and combinations thereof.

[0147] In some instances, the PGx gene is ABCG2 and the drug is rosuvastatin.

[0148] In some instances, the PGx gene is ABL2 and the drug is valproic acid.

[0149] In some instances, the PGx gene is ASL and the drug is valproic acid.

[0150] In some instances, the PGx gene is CACNA1S and the drug is selected from the group consisting of desflurane, enflurane, halothane, isoflurane, methoxyflurane, sevoflurane, succinylcholine, and combinations thereof.

[0151] In some instances, the PGx gene is CFTR and the drug is ivacaftor.

[0152] In some instances, the PGx gene is CPS1 and the drug is valproic acid.

[0153] In some instances, the PGx gene is CYP2B6 and the drug is selected from the group consisting of efavirenz, methadone, and combinations thereof.

[0154] In some instances, the PGx gene is CYP2C19 and the drug is selected from the group consisting of amitriptyline, brivaracetam, citalopram, clomipramine, clopidogrel, dexlansoprazole, doxepin, escitalopram, imipramine, lansoprazole, omeprazole, pantoprazole, sertraline, trimipramine, voriconazole, and combinations thereof.

[0155] In some instances, the PGx gene is CYP2C19 and the drug is selected from the group consisting of acenocoumarol, celecoxib, flurbiprofen, fosphenytoin, ibuprofen, lornoxicam, meloxicam, phenytoin, piroxicam, siponimod, tenoxicam, warfarin, amitriptyline, aripiprazole, atomoxetine, clomipramine, codeine, desipramine, doxepin, eliglustat, fluvoxamine, hydrocodone, imipramine, nortriptyline, oliceridine, ondansetron, paroxetine, pimozide, pitolisant, risperidone, tamoxifen, tetrabenazine, tramadol, trimipramine, tropisetron, venlafaxine, vortioxetine, and combinations thereof.

[0156] In some instances, the PGx gene is CYP3A5 and the drug is tacrolimus.

[0157] In some instances, the PGx gene is CYP4F2 and the drug is selected from the group consisting of acenocoumarol, phenprocoumon, warfarin, and combinations thereof.

[0158] In some instances, the PGx gene is DPYD and the drug is selected from the group consisting of capecitabine, fluorouracil, and combinations thereof.

[0159] In some instances, the PGx gene is G6PD and the drug is selected from the group consisting of aspirin, chloramphenicol, chlorpropamide, ciprofloxacin, dapsone, dimercaprol, glibenclamide, glimepiride, glipizide, mafenide, mesalazine, methylene blue, moxifloxacin, nalidixic acid, nitrofurantoin, norfloxacin, pegloticase, phenazopyridine, primaquine, probenecid, quinine, rasburicase, sodium nitrite, sulfacetamide, sulfadiazine, sulfamethoxazole/trimethoprim, sulfasalazine, sulfisoxazole, tafenoquine, and combinations thereof.

[0160] In some instances, the PGx gene is GBA and the drug is velaglucerase alfa

[0161] In some instances, the PGx gene is HLA-A and the drug is carbamezapine.

[0162] In some instances, the PGx gene is HLA-B and the drug is selected from the group consisting of abacavir, allopurinol, carbamazepine, fosphenytoin, oxcarbazepine, phenytoin, and combinations thereof.

[0163] In some instances, the PGx gene is HPRT1 and the drug is mycophenolic acid.

[0164] In some instances, the PGx gene is IFNL3 and the drug is selected from the group consisting of peginterferon alfa-2a, peginterferon alfa-2b, and combinations thereof.

[0165] In some instances, the PGx gene is IFNL4 and the drug is selected from the group consisting of peginterferon alfa-2a, peginterferon-2b, and combinations thereof.

[0166] In some instances, the PGx gene is MT-RNRI and the drug is selected from the group consisting of amikacin, gentamicin, kanamycin, paromomycin, plazomicin, streptomycin, tobramycin, and combinations thereof.

[0167] In some instances, the PGx gene is NAGS and the drug is selected from the group consisting of arglumic acid, valproic acid, and combinations thereof.

[0168] In some instances, the PGx gene is NAT2 and the drug is hydralazine.

[0169] In some instances, the PGx gene is NUDT15 and the drug is selected from the group consisting of azathioprine, mercaptopurine, thioguanine, and combinations thereof.

[0170] In some instances, the PGx gene is OTC and the drug is valproic acid.

[0171] In some instances, the PGx gene is POLG and the drug is selected from the group consisting of divalproex sodium, valproic acid, and combinations thereof.

[0172] In some instances, the PGx gene is RYR1 and the drug is selected from the group consisting of desflurane, enflurane, halothane, isoflurane, methoxyflurane, sevoflurane, succinylcholine, and combinations thereof.

[0173] In some instances, the PGx gene is SCN1A and the drug is selected from the group consisting of carbamazepine, phenytoin, and combinations thereof.

[0174] In some instances, the PGx gene is SLCO1B1 and the drug is simvastatin.

[0175] In some instances, the PGx gene is TPMT and the drug is selected from the group consisting of mercaptopurine, thioguanine, and combinations thereof.

[0176] In some instances, the PGx gene is UGT1A1 and the drug is selected from the group consisting of atazanavir, belinostat, irinotecan, and combinations thereof.

[0177] In some instances, the PGx gene is VKORC1 and the drug is warfarin.

### EXAMPLES

[0178] The invention is further described in the following examples, which do not limit the scope of the invention described in the claims.

### Example 1: PGx Array Genotyping Protocol

[0179] FIGS. 3A-3C show an overview of a workflow for PGx genotyping using the Infinium® Global Diversity Array with Enhanced PGx. In this example, on day 1, DNA is optionally quantified, whole genome amplified, and PGx amplified (e.g., by TGA). On day 2, the PGx amplified sample is recombined with the WGA, the recombined sample is fragmented, the nucleic acid precipitated and then re-suspended, and the re-suspended sample is hybridized to the BeadChip®. On day 3, the BeadChip® is washed, extended, stained, and imaged. Genotyping was carried out using Infinium® LCG assay chemistry. Steps 1, 2, and 5-11 were carried out according to the manufacturer instructions for the Infinium® Global Diversity Array. See Illumina® Infinium® LCG Assay Reference Guide, Document #15023139 v04 (2019), available at support.illumina.com, except DNA input was 5 μl of 20 ng/μl as opposed to 4 μl of 50 ng/μl. Steps 3 and 4, described below, are specific to the Enhanced PGx array.

### 3) Amplify PGx

[0180] 1. Add 10 μl MAI to each well of the PGx plate.
[0181] 2. Add 10 μl PGP to each well of the PGx plate. PGP is a primer mix containing the primers shown in Table 4, whose sequences are set forth in Table 2.

TABLE 4
PGP

| | | Amount in Rxn | | Amount/Concentration | |
|---|---|---|---|---|---|
| | | (10 μL per | | in PGP (1,100 μL | |
| ID | Component | reaction) | | volume) | |
| Diluent | RM, | to volume | | to volume | |
| | Resuspension | | | | |
| | Buffer, IDTE, | | | | |
| | pH 8.0 | | | | |
| CYP2D6 E1 F | Primer | 0.100 | μM | 0.25 | μM |
| CYP2D6 E1 R | Primer | 0.100 | μM | 0.25 | μM |
| CYP2D6 E2 F | Primer | 0.100 | μM | 0.25 | μM |
| CYP2D6 E2 R | Primer | 0.100 | μM | 0.25 | μM |
| CYP2D6 | Primer | 0.300 | μM | 0.75 | μM |
| E3-4 F | | | | | |
| CYP2D6 | Primer | 0.300 | μM | 0.75 | μM |
| E3-4 R | | | | | |
| CYP2D6 | Primer | 0.200 | μM | 0.5 | μM |
| E5-6 F | | | | | |
| CYP2D6 | Primer | 0.200 | μM | 0.5 | μM |
| E5-6 R | | | | | |
| CYP2D6 E7 F | Primer | 0.200 | μM | 0.5 | μM |
| CYP2D6 E7 R | Primer | 0.200 | μM | 0.5 | μM |
| CYP2B6 E1 F | Primer | 0.100 | μM | 0.25 | μM |
| CYP2B6 E1 R | Primer | 0.100 | μM | 0.25 | μM |
| CYP2B6 | Primer | 0.100 | μM | 0.25 | μM |
| E10 F | | | | | |
| CYP2B6 | Primer | 0.100 | μM | 0.25 | μM |
| E10 R | | | | | |
| TPMT F | Primer | 0.100 | μM | 0.25 | μM |
| TPMT R | Primer | 0.100 | μM | 0.25 | μM |
| Lambda F | Primer | 0.025 | μM | 0.0625 | μM |
| Lambda R | Primer | 0.025 | μM | 0.0625 | μM |
| Lambda | Lambda, | 16 | pg/μL | 40 | pg/μL |
| Template, | 10 ng/μL | | | | |
| dsDNA | | | | | |

[0182] 3. Add 10 μl PGM to each well of the PGx plate. PGM contains the components shown in Table 5:

TABLE 5
PGM

| | | | Amount/Concentration | |
|---|---|---|---|---|
| | Amount in Rxn (10 | | in PGM (1,100 μL | |
| Component | μL per reaction) | | volume) | |
| Water, Nuclease-Free | to volume | | to volume | |
| dUTP, 100 mM Solution | 0.1 | mM | 0.25 | mM |
| dTTP, 100 mM Solution | 0.2 | mM | 0.5 | mM |
| dGTP, 100 mM Solution | 0.2 | mM | 0.5 | mM |
| dCTP, 100 mM Solution | 0.2 | mM | 0.5 | mM |
| dATP, 100 mM Solution | 0.2 | mM | 0.5 | mM |
| 5x Buffer Q5U | 0.8 | x | 2 | x |
| Q5U Polymerase | 0.05 | Units/μL | 0.125 | Units/μL |

[0183] 4. Transfer 5 μl DNA sample from the DNA plate to the corresponding wells of the PGx plate.
[0184] 5. Apply Microseal ‘B’ to the PGx plate and make sure each well is tightly sealed with no bubbles or gaps in the film.
[0185] 6. Vortex at 1600 rpm for 15 seconds, and then pulse centrifuge at 280×g for 1 minute.
[0186] 7. PCR at 98° C. for 30 s, followed by 11 cycles of 98° C. for 30 s, 76° C. for 30 s, 72° C. for 30 s, followed by 21 cycles of 98° C. for 30 s, 66° C. for 30 s, 72° C. for 30 s, followed by 72° C. for 5 minutes. Hold at 4° C.

### 4) Recombine WGA and Amplified PGx

[0187] 1. Transfer 6.5 μL of the PGx product from the PGx plate directly into the corresponding wells of the WGA plate.
[0188] 2. Proceed to fragmentation.

### Example 2: PGx Array Genotyping is Accurate, Precise, and Reproducible

[0189] Genotyping was carried out on the Infinium® Global Diversity Array with Enhanced PGx array as described in Example 1 on 192 samples representing a broad array of PGx SNV and CNV genotypes (replicates 1-5) and 384 samples including the 192 from replicates 1-5 and an additional 192 CNV samples (replicate 6). SNVs were called using the GenomeStudio® Genotyping Module described, for example, in Gunderson et al., “Whole-Genome Genotyping,” Methods Enzymol. 410:359-76 (2006). CNVs were called according to the methods described in US20200381079, which is hereby incorporated by reference in its entirety.

[0190] As shown in FIG. 4A, call rate was greater than 99% across the entire array, while, as shown in FIG. 4B, LogRDev was less than 0.15. As shown in Table 6, 5 samples (0.6%, indicated with *) failed the first pass and were re-queued. They were successful on the second pass. For the PGx content, as shown in FIG. 4C, call rate was greater than 99% and LogRDev was less than 0.17.

TABLE 6
Array Genotyping Statistics

| | No. | Call | | Failures | PGx | PGx |
|---|---|---|---|---|---|---|
| Replicate | Samples | Rate | LogRDev | (%) | CR | LogRDev |
| 1 | 96 | 0.997 | 0.147 | 0 | 0.9995 | 0.1634 |
| 2 | 95* | 0.997 | 0.146 | 1 | 0.9995 | 0.1702 |
| 3 | 96 | 0.997 | 0.145 | 0 | 0.9996 | 0.1724 |
| 4 | 96 | 0.997 | 0.147 | 0 | 0.9996 | 0.1731 |
| 5 | 96 | 0.997 | 0.144 | 0 | 0.9995 | 0.1753 |
| 6 | 380* | 0.997 | 0.152 | 1 | 0.9992 | 0.1648 |
| All | 859* | 0.997 | 0.148 | 0.6 | 0.9995 | 0.1682 |

### Example 3: PGx Content Underpinning Star Alleles is Accurate

[0191] Genotyping was carried out on the Infinium® Global Diversity Array with Enhanced PGx array as described in Example 1. Small variants in star alleles were called using the GenomeStudio® Genotyping Modconule described, for example, in Gunderson et al., “Whole-Genome Genotyping,” Methods Enzymol. 410:359-76 (2006). Genotyping statistics are shown in Table 7.

TABLE 7
PGx Genotyping Statistics (Small Variants)

| | | | | Minor | |
|---|---|---|---|---|---|
| | PGx | Possible | Possible | Alleles | |
| | Variants | Major | Minor | Called | Concordance |
| PGx Content | Evaluated | Alleles | Alleles | Correctly | to NGS |
| PGx (all) | 80/542 | 15741 | 902 | 894 | 99.1% |
| PGx (TGA | 28/89 | 4544 | 212 | 208 | 98.1% |
| targets) | | | | | |

[0192] True positive rates for 19 TGA targets is shown in FIG. 5. Concordance to orthogonal data was found to be similar for regions with and without TGA coverage (98.1% and 99.1%, respectively) showing that TGA rescues the ability to accurately assess the noisy region of high homology that it was selected to improve. Samples were selected to maximize coverage of minor variants to assess accuracy.

### Example 4: PGx Content is Accurate, Precise, and Reproducible

[0193] Genotyping was carried out on the Infinium® Global Diversity Array with Enhanced PGx array as described in Example 1. Small variants in star alleles were called using the GenomeStudio® Genotyping Module described, for example, in Gunderson et al., “Whole-Genome Genotyping,” Methods Enzymol. 410:359-76 (2006).

[0194] As shown in Table 8, the system is accurate, precise, and reproducible for genotyping PGx small variants.

TABLE 8
PGx Genotyping Statistics (Small Variants) -
Accuracy, Precision, and Reproducibility

| | | Avg |
|---|---|---|
| Test | Conditions | Reproducibility |
| Concordance | Run 1-5 versus Gentrain Genotype calls | 0.9999 |
| Repeatability, | SNV plate: 3 samples (9X) | PGx: 0.9999 |
| (intra-run) | DNA input, ng: 200 (7X), 100 (1X), | All: 0.9999 |
| | 400 (1X) | |
| | Multiple plate/BeadChip ® loading | |
| | positions | |
| Repeatability | Three runs (Run 1-3) | PGx: 1.000 |
| (inter-run) | 3 samples (9X); 21 samples (1X0 | All: 0.999 |
| | Same operator for manual library prep, | |
| | reagents, and instruments, on the same | |
| | day | |
| Reproducibility | Five runs (Run 1-5) | PGx: 0.9999 |
| (inter-run) | 3 samples (9X); 21 samples (1X) | All: 0.9999 |
| | 3 operators, 2 Tecans for X-stain, 3 | |
| | TGA kits | |

### Example 5: Improved Stability for Improved CNV Calling

[0195] To understand the impact of the first step of whole genome amplification (denaturation of DNA by addition of sodium hydroxide (NaOH)) on CNV calling capability, a titration of NaOH molarity/normality into denaturation was performed, with a functional assay readout. To adjust the hydroxide concentration of the denaturation reaction, molarity of stock NaOH was adjusted while holding the volume added constant. The assay metric Log R Mean, a measure of how similarity of test data to reference data, was used as a proxy for CNV calling capability, with results trending closer to 0 indicating higher capability. Additionally, normalized signal (R) was measured across the hydroxide titration to understand stability of signal. Signal that trends higher or lower than reference is considered a gain or loss of copy number (respectively) due to the mechanics of the CNV Caller.

[0196] A second titration was run varying the input volumes and normalities of NaOH, with data being analyzed by 1) an Illumina-developed CYP2D6 CNV Caller, and 2) comparison of normalized signal over probes sorted by GC content. For testing of the CNV caller, 96 samples with a spread of CYP2D6 copy numbers were selected.

[0197] Signal stabilized between addition of 0.1 N and 0.2 N NaOH (0.044 M and 0.088 M hydroxide concentration in DNA denaturation, respectively), with normalized signal and Log R Mean shifting lower at 0.05 M and 0.5 M NaOH (0.022 N and 0.22 N hydroxide concentration in DNA denaturation, respectively) (FIGS. 7A and 7B). FIG. 7A shows distributions of normalized signal (R) resulting from denaturation conditions with varying normality of NaOH. Distributions around 0.9 are optimal, resulting from a range of NaOH normalities from 0.1 to 0.2. Increasing or decreasing NaOH de-stabilizes signal, resulting in decreases in normalized signal that lead to errors in CNV calling. FIG. 7B shows signal displayed as Log R Mean, a metric comparing test data to reference data, where stable Log R Mean indicates stable signal (Log R Mean is the average Log R Ratio in a set of probes; see online at illumina.com/Documents/products/technotes/technote_cytoanalysis.pdf). Log R Mean is stable for denaturation conditions using 0.1 to 0.2 N NaOH, indicating that CNV calling is stable and accurate in this range.

[0198] Additionally, it was found that lowering the addition of NaOH to 4 μl of 0.033 N NaOH suppressed the ability of the CNV Caller to accurately call CNV content. Signal trended by GC content, with less than 0.044 N (4 μl of 0.1 N NaOH added) yielding suppressed signal at high and low % GC probes (FIGS. 8A and 8B). FIG. 8A shows CNV Caller F measure (a metric incorporating both accuracy and precision) for three regions of CYP2D6. Force Fail shows low F measures indicating poor CNV caller performance with a hydroxide concentration of 0.015 M in denaturation. Denaturation conditions with hydroxide concentration of 0.03 M through 0.075 M yield similar F measures, indicating high quality and stable CNV calling capability. Together, this result shows that the hydroxide concentration in denaturation is a critical parameter to enable accurate CNV assessment, and that optimizing this parameter increases CNV calling capability.

[0199] Denaturation reaction conditions lead to shifts in signal that impact the capability of CNV Calling in genotyping. This can be a source of bias that leads to inaccurate CNV calling, with accuracy of genotyping methods improved through optimization of denaturation. Because the mechanism of CNV calling methods typically rely on comparison of a test sample to a reference sample, or test region to a reference region, and because denaturation leads to shifting in a GC-content dependent manner, optimization of denaturation and other workflow conditions that impact signal bias is expected to improve CNV calling across genomics technologies.

[0200] CNV calling is accomplished through measuring direct and relative amounts of DNA present for regions of interest. This can be done by comparing the amount of DNA, or a proxy like signal generated from DNA, in a target region relative to a control region, or a specific sample against a reference sample, as two examples. In taking such measurements, biases present in the assay have the potential to impact the results. One such bias relates to the DNA base content, often considered as the aggregate of G+C (GC content), of the genome. For example, a polymerase may more efficiently amplify some regions than others, and this can relate to the GC content of these regions. There can be additional layers of variability in a process, for example the bias can be increased or decreased in strength by increasing or decreasing the concentration of enzymes or other reaction components. In general, reducing such biases will increase the ability to calibrate the assay, thereby increasing the accuracy of results.

[0201] In determining CNV states in PGx regions, a key source of bias was found to be the sodium hydroxide (NaOH) step. The concentration of hydroxide (OH) compared to the concentration of the DNA sample was determined to be a critical parameter, with incomplete DNA denaturation occurring in a biased manner, leading to a signal bias that related to the GC content of the regions in question. Because PGx content (e.g. CYP2D6) is significantly higher GC content compared with the average across the genome, these regions were more heavily affected by this effect. It was determined that the denaturation step had to be modified to include a minimum hydroxide concentration compared with DNA concentration, which was achieved by adjusting the amount of NaOH added at a specific normality. Additionally, because NaOH acidifies when exposed to the atmosphere, lowering the hydroxide concentration of the solution, limits were placed on how long the reagent can be left out before being added to a reaction. Addition of mineral oil to the WGA reaction helps reduce acidification, and adding NaOH and DNA under a layer of mineral oil is another necessary step to ensure high quality CNV calling.

### Example 6: Improved Pseudogene Disambiguation Using TGA

[0202] 288 samples tested on a prototype GDA-PGx chip showed that incorporating the TGA step in the workflow improved signal disambiguation for regions covered by TGA amplicons. Signal for probes under five regions of CYP2D6 are shown with (top) or without (bottom) the TGA step added (FIG. 6). Without signal disambiguation, covered variants were called with 80.1% accuracy, while adding TGA improved accuracy to 99.3%.

[0203] The source of the noise in CYP2D6 regions shown in FIG. 6 is two highly homologous pseudogenes, CYP2D7 and CYP2D8. When genotyping WGA material alone, roughly equivalent amounts of DNA from each of the three regions is present in the library, and all of them can potentially hybridize on capture probes intended only for CYP2D6. The result is that signal from CYP2D6 is highly polluted with noise from CYP2D7 and CYP2D8 (80.1%, FIG. 6, top). In other genes, the same dynamic can play out with pseudogenes, other genes of high homology to target, or under other conditions of high homology.

[0204] To circumvent this challenge, material from the TGA process, in this case amplified via multiplex PCR, is added to the WGA before hybridization to the array. This process is optimized to ensure that signal is generated from amplified, on-target material, and that background WGA is reduced to noise. This results in genotyping of the desired amplified material, making it possible to obtain accurate genotyping results (99.3%, FIG. 6. bottom).

[0205] This process is designed to leave some areas uncovered by amplicons, to enable CNV calling to be performed on background WGA signal.

### Example 7: Improving Workflow Incorporation and Probe Performance with Uracil PCR

[0206] In some cases, increasing the amount of DNA in the hybridization solution can paradoxically lead to a decrease in signal at target probes, inhibiting either/both binding of target DNA to probes or signal generation of captured DNA. Incorporating amplified DNA into genomic DNA samples before WGA occurs leads to a rescue of this phenotype, but is not compatible with lab workflows. This creates challenges to the incorporation of amplified DNA into the genotyping workflow, and operational constraints around handling of samples, e.g. physical separation of pre- and post-amplification rooms, limit the options to address the issue.

[0207] To circumvent the issue of both PCR material handling and signal decrease with increasing DNA concentration, the TGA step was modified to include uracil in the PCR step. This enabled target regions to be amplified and then integrated into the workflow before the U-dependent fragmentation step, yielding fragmented amplicons that are able to bind probe sequences and generate signal. FIG. 9 shows results of using a probe that shows high levels of noise in the control (WGA only, “Control”—points in the middle of the right half of the graph) evidenced by a theta value far from any canonical cluster (0, 0.5, or 1), is inhibited in the presence of multiplex PCR-amplified material that does not contain uracil (WGA+mPCR, “mPCR”—points in lower left of the graph), and yields an AB call at the canonical cluster position in the presence of uracil-containing multiplex PCR (mUPCR+WGA, “mUPCR”—points clustered in the middle of the upper half of the graph), demonstrating rescue of an inhibited probe by fragmentation of the target amplicon.

### Sequences

SEQ ID NO: 1 (CYP2D6)
>NG_008376.4:5001-9312 Homo sapiens cytochrome P450 family 2 subfamily D member 6
(CYP2D6), RefSeqGene (LRG_303) on chromosome 22
ATTTGGTAGTGAGGCAGGTATGGGGCTAGAAGCACTGGTGCCCCTGGCCGTGATAGTGGCCATCTTCCTGCTCCTGG
TGGACCTGATGCACCGGCGCCAACGCTGGGCTGCACGCTACCCACCAGGCCCCCTGCCACTGCCCGGGCTGGGCAAC
CTGCTGCATGTGGACTTCCAGAACACACCATACTGCTTCGACCAGGTGAGGGAGGAGGTCCTGGAGGGCGGCAGAGG
TGCTGAGGCTCCCCTACCAGAAGCAAACATGGATGGTGGGTGAAACCACAGGCTGGACCAGAAGCCAGGCTGAGAAG
GGGAAGCAGGTTTGGGGGACGTCCTGGAGAAGGGCATTTATACATGGCATGAAGGACTGGATTTTCCAAAGGCCAAG
GAAGAGTAGGGCAAGGGCCTGGAGGTGGAGCTGGACTTGGCAGTGGGCATGCAAGCCCATTGGGCAACATATGTTAT
GGAGTACAAAGTCCCTTCTGCTGACACCAGAAGGAAAGGCCTTGGGAATGGAAGATGAGTTAGTCCTGAGTGCCGTT
TAAATCACGAAATCGAGGATGAAGGGGGTGCAGTGACCCGGTTCAAACCTTTTGCACTGTGGGTCCTCGGGCCTCAC
TGCTCACCGGCATGGACCATCATCTGGGAATGGGATGCTAACTGGGGCCTCTCGGCAATTTTGGTGACTCTTGCAAG
GTCATACCTGGGTGACGCATCCAAACTGAGTTCCTCCATCACAGAAGGTGTGACCCCCACCCCCGCCCCACGATCAG
GAGGCTGGGTCTCCTCCTTCCACCTGCTCACTCCTGGTAGCCCCGGGGGTCGTCCAAGGTTCAAATAGGACTAGGAC
CTGTAGTCTGGGGTGATCCTGGCTTGACAAGAGGCCCTGACCCTCCCTCTGCAGTTGCGGCGCCGCTTCGGGGACGT
GTTCAGCCTGCAGCTGGCCTGGACGCCGGTGGTCGTGCTCAATGGGCTGGCGGCCGTGCGCGAGGCGCTGGTGACCC
ACGGCGAGGACACCGCCGACCGCCCGCCTGTGCCCATCACCCAGATCCTGGGTTTCGGGCCGCGTTCCCAAGGCAAG
CAGCGGTGGGGACAGAGACAGATTTCCGTGGGACCCGGGTGGGTGATGACCGTAGTCCGAGCTGGGCAGAGAGGGCG
CGGGGTCGTGGACATGAAACAGGCCAGCGAGTGGGGACAGCGGGCCAAGAAACCACCTGCACTAGGGAGGTGTGAGC
ATGGGGACGAGGGCGGGGCTTGTGACGAGTGGGCGGGGCCACTGCCGAGACCTGGCAGGAGCCCAATGGGTGAGGCT
GGCGCATTTCCCAGCTGGAATCCGGTGTCGAAGTGGGGGGCGGGGACCGCACCTGTGCTGTAAGCTCAGTGTGGGTG
GCGCGGGGCCCGCGGGGTCTTCCCTGAGTGCAAAGGCGGTCAGGGTGGGCAGAGACGAGGTGGGGCAAAGCCCTGCC
CCAGCCAAGGGAGCAAGGTGGATGCACAAAGAGTGGGCCCTGTGACCAGCTGGACAGAGCCAGGGACTGCGGGAGAC
CAGGGGGAGCATAGGGTTGGAGTGGGTGGTGGATGGTGGGGCTAATGCCTTCATGGCCACGCGCACGTGCCCGTCCC
ACCCCCAGGGGTGTTCCTGGCGCGCTATGGGCCCGCGTGGCGCGAGCAGAGGCGCTTCTCCGTGTCCACCTTGCGCA
ACTTGGGCCTGGGCAAGAAGTCGCTGGAGCAGTGGGTGACCGAGGAGGCCGCCTGCCTTTGTGCCGCCTTCGCCAAC
CACTCCGGTGGGTGATGGGCAGAAGGGCACAAAGCGGGAACTGGGAAGGCGGGGGACGGGGAAGGCGACCCCTTACC
CGCATCTCCCACCCCCAGGACGCCCCTTTCGCCCCAACGGTCTCTTGGACAAAGCCGTGAGCAACGTGATCGCCTCC
CTCACCTGCGGGCGCCGCTTCGAGTACGACGACCCTCGCTTCCTCAGGCTGCTGGACCTAGCTCAGGAGGGACTGAA
GGAGGAGTCGGGCTTTCTGCGCGAGGTGCGGAGCGAGAGACCGAGGAGTCTCTGCAGGGCGAGCTCCCGAGAGGTGC
CGGGGCTGGACTGGGGCCTCGGAAGAGCAGGATTTGCATAGATGGGTTTGGGAAAGGACATTCCAGGAGACCCCACT
GTAAGAAGGGCCTGGAGGAGGAGGGGACATCTCAGACATGGTCGTGGGAGAGGTGTGCCCGGGTCAGGGGGCACCAG
GAGAGGCCAAGGACTCTGTACCTCCTATCCACGTCAGAGATTTCGATTTTAGGTTTCTCCTCTGGGCAAGGAGAGAG
GGTGGAGGCTGGCACTTGGGGAGGGACTTGGTGAGGTCAGTGGTAAGGACAGGCAGGCCCTGGGTCTACCTGGAGAT
GGCTGGGGCCTGAGACTTGTCCAGGTGAACGCAGAGCACAGGAGGGATTGAGACCCCGTTCTGTCTGGTGTAGGTGC
TGAATGCTGTCCCCGTCCTCCTGCATATCCCAGCGCTGGCTGGCAAGGTCCTACGCTTCCAAAAGGCTTTCCTGACC
CAGCTGGATGAGCTGCTAACTGAGCACAGGATGACCTGGGACCCAGCCCAGCCCCCCCGAGACCTGACTGAGGCCTT
CCTGGCAGAGATGGAGAAGGTGAGAGTGGCTGCCACGGTGGGGGGCAAGGGTGGTGGGTTGAGCGTCCCAGGAGGAA
TGAGGGGAGGCTGGGCAAAAGGTTGGACCAGTGCATCACCCGGCGAGCCGCATCTGGGCTGACAGGTGCAGAATTGG
AGGTCATTTGGGGGCTACCCCGTTCTGTCCCGAGTATGCTCTCGGCCCTGCTCAGGCCAAGGGGAACCCTGAGAGCA
GCTTCAATGATGAGAACCTGCGCATAGTGGTGGCTGACCTGTTCTCTGCCGGGATGGTGACCACCTCGACCACGCTG
GCCTGGGGCCTCCTGCTCATGATCCTACATCCGGATGTGCAGCGTGAGCCCATCTGGGAAACAGTGCAGGGGCCGAG
GGAGGAAGGGTACAGGCGGGGGCCCATGAACTTTGCTGGGACACCCGGGGCTCCAAGCACAGGCTTGACCAGGATCC
TGTAAGCCTGACCTCCTCCAACATAGGAGGCAAGAAGGAGTGTCAGGGCCGGACCCCCTGGGTGCTGACCCATTGTG
GGGACGCATGTCTGTCCAGGCCGTGTCCAACAGGAGATCGACGACGTGATAGGGCAGGTGCGGCGACCAGAGATGGG
TGACCAGGCTCACATGCCCTACACCACTGCCGTGATTCATGAGGTGCAGCGCTTTGGGGACATCGTCCCCCTGGGTG
TGACCCATATGACATCCCGTGACATCGAAGTACAGGGCTTCCGCATCCCTAAGGTAGGCCTGGCGCCCTCCTCACCC
CAGCTCAGCACCAGCACCTGGTGATAGCCCCAGCATGGCTACTGCCAGGTGGGCCCACTCTAGGAACCCTGGCCACC
TAGTCCTCAATGCCACCACACTGACTGTCCCCACTTGGGTGGGGGGTCCAGAGTATAGGCAGGGCTGGCCTGTCCAT
CCAGAGCCCCCGTCTAGTGGGGAGACAAACCAGGACCTGCCAGAATGTTGGAGGACCCAACGCCTGCAGGGAGAGGG
GGCAGTGTGGGTGCCTCTGAGAGGTGTGACTGCGCCCTGCTGTGGGGTCGGAGAGGGTACTGTGGAGCTTCTCGGGC
GCAGGACTAGTTGACAGAGTCCAGCTGTGTGCCAGGCAGTGTGTGTCCCCCGTGTGTTTGGTGGCAGGGGTCCCAGC
ATCCTAGAGTCCAGTCCCCACTCTCACCCTGCATCTCCTGCCCAGGGAACGACACTCATCACCAACCTGTCATCGGT
GCTGAAGGATGAGGCCGTCTGGGAGAAGCCCTTCCGCTTCCACCCCGAACACTTCCTGGATGCCCAGGGCCACTTTG
TGAAGCCGGAGGCCTTCCTGCCTTTCTCAGCAGGTGCCTGTGGGGAGCCCGGCTCCCTGTCCCCTTCCGTGGAGTCT
TGCAGGGGTATCACCCAGGAGCCAGGCTCACTGACGCCCCTCCCCTCCCCACAGGCCGCCGTGCATGCCTCGGGGAG
CCCCTGGCCCGCATGGAGCTCTTCCTCTTCTTCACCTCCCTGCTGCAGCACTTCAGCTTCTCGGTGCCCACTGGACA
GCCCCGGCCCAGCCACCATGGTGTCTTTGCTTTCCTGGTGAGCCCATCCCCCTATGAGCTTTGTGCTGTGCCCCGCT
AGAATGGGGTACCTAGTCCCCAGCCTGCTCCCTAGCCAGAGGCTCTAATGTACAATAAAGCAATGTGGTAGTTCCAA
SEQ ID NO: 2 (CYP2B6)
Homo sapiens cytochrome P450 family 2 subfamily B member 6 (CYP2B6), RefSeqGene
(LRG_1267) on chromosome 19
NCBI Reference Sequence: NG_007929.1
>NG_007929.1:4984-32100 Homo sapiens cytochrome P450 family 2 subfamily B member 6
(CYP2B6), RefSeqGene (LRG_1267) on chromosome 19
GTGCAGGGCAGTCAGACCAGGACCATGGAACTCAGCGTCCTCCTCTTCCTTGCACTCCTCACAGGACTCTTGCTACT
CCTGGTTCAGCGCCACCCTAACACCCATGACCGCCTCCCACCAGGGCCCCGCCCTCTGCCCCTTTTGGGAAACCTTC
TGCAGATGGATAGAAGAGGCCTACTCAAATCCTTTCTGAGGGTAAGACACAGACGAATGGGGTCTGAGGGTGAGCTG
CTTCTTGCCTTGGTACTTGGGGAAGCTTCACCAAACAGAATGAGGCAGACTTCCAGAGTCAGGGGTGGCACGGGCAT
GGTTGGTGAGTACGGAGCATGGTGAAGCATGATGGGTGGTATTATTAGGAGAAAAGCATCAAATTAAATTTAGCAGA
GTTTATTTGAGCAAAGAAGTGACTCATGAGTTGGACAGCTCCCTAAACCAGGAAAGACACCACACGGCAGTATGGTC
AAGTGGTATTTACAGGCAGAAAAAGGAGGTGACATACAGAAACAGCCTGATTGGCCACAGATCACAGCTTGCCTTAC
TTGGTCACAATCTGAGCAGTTTGCAGCCTGTGTGGACTGAAAGCCCAGCTGCTCTGATTAGCCAACACTTGGCTACT
TGTCACAAGAATATATTCATTTGGGCCAGGTGCAGTGGCTCATGCCTGTAATCCCAGTGCTTTTGGAGGCCGAGGTG
GTGGATCACCTGAGGTCAGGAGTTCGAGACCAGCCTGGCCAACATGGTGAAACCTTGTCTCTACTAAAAATACAAAT
ATTAGCTGGGCATAGTGATGCGTGCCTGTAATCTCAGCTACCCAGGAGGCTGAGGAAGGAGAATCACTTGAATCCAG
GAGGCAGAGGTTGCAGTGAGCCAAAATCTTACCACTGCACTCCATCCTGGGTGACAGAGTGAGACTCCTTCTCAAAA
AAAAAAAAAAAAAAAAGAATATACTCCCAAGTTAGGTTGCAGTTCACTCTACAGAGAGAGCTTTAGGTCAAATTTAA
TTTAATTAAACAATTCTCCCCTTTTGGTCAGCCTCAAAATTTTGAGATTGACCAAAACCTTGGGCATCAACATTACT
TCTGTCACCATCATAATGGACTTGTCTGCTCTCAGTATGGAATTCACAATGGACAATGTCAACGTAGTTGAGTGATT
CTTTACCTTTTCTTCATGTTTTTGTTGTTCCCACTGTAATGAGCCCACTGGATGTACAAAGAATGGCTGCATATGAG
CATTTAAGACTCTTTTTTTTTCTGAGACAGGGCCTCACTCTGTCAGCCAGGCTGAAGTGCTGTGGCATGATCACGTC
TCACTGCAGCCTTGACCTCCCAAGGCTCAAGTGATCCTCCTGCCTCAGCCCCCCAAGTAGCTGGAACTACAGGTGCA
TGCCACCACGCCCAGCTAATTTTTGTATTTTTTGTAGAGACAGGGTTTTGCCATGTTGCCCAGACTGGTCTTAAACT
CCTGGGCTCAAGCAATCCACCTGCCTCGGCCTCCCAAAGTGCTAGGATTACATGTGTGAGCCACCGCACCCGGCCAA
GACTCTTGAGAAAATACAACACATCAGGGAGACTGTTATGATGGCTCTCAGGAGGGTAATACGAAGAAAATGAAGTC
ACTGGGCCTGTAATAAACTTTGAGGAATGTGGACTTGGGGGTATAGATAAGGTCCACTGTCCACAGAGAGAAGAAAG
GCTGTTAATAGTCTCTTTTAACTTGAGTGTGTCCATGAACCAAACTGATCAAAATCGAATAATTCGAAGTTCAGACA
ATAAAGATAGTTCAATAGTATTAGAGTCCAATTGGTCATAGATTTTGTTCAGGGCATGATGGTAATTAAGGACCAGA
GCTTGCTATAAAATAACTTGATTTATAGAGACATTCATTTGTAGTTGGCCTGGTAACATATAGTATCCTGGAGACCC
ACTAGAAGAAACATTAAGAGTAGAAAAGTTTGGGATAGCCAGGCTTGCTGTGTTAGTCCATTCTCACACTGTTATAA
AGACATACCTGAGACTGGGTAATTTATAAACAAAAGGGATGTAACTGACTCACAGTTCCACATGGCTGGGGAGGCCC
CAGGAAAATACAATTCATGGCAAAAGGTGAATGAGAAGCAGGAAACTTACAATCATGATGGAAGGTGAAGGAGAAGC
AAGTACCTTCTTCACAAGGTGGCAGGAAAAAGAGAGAGAGCCAAGGGGGAAGAGCCTCTTATAAAACCATCAGATCT
TGTGAGAACTCACTCACTATCACAAGAACAGCATGGGGGAAACCGCCCCCAGGATCCAGTTACCTCCTACTAGGTCC
TTCCCTCCACACCTGGGGATTACAATTCAAGATGAGATTTGGGTGAGGACACAGAGCCAAACCATATCACTTACCAT
CACCATTCAGGATGCTTGCAAACCAACTGCTAGCTGCACCTGTAAACACATATCTGTTTCTTTCCCCTGAGAAATGT
CCTTAGTGTATTTGTGGCAGTGTCTAGAGAAACAGCAGTGTCAGCCGCATTTTAAATTAAGTTATCTGCACTAGTGA
ATTCACTGGAAAGATAAGAGCAATATTTGGTTTTCTTCAGCACCATACACAAGCCTCCAAGATGGGCATAGAGGAGA
TCTAAAATTGCGTGATGTTCCATTAAGCGTTTTTGTTGCCACAAATGTTCTCATCTCAGTTTGGAGAGTGGCTTCTA
CCCATCTGAACTCCTTGGAGGTTCAATTAGCTGCAAAATTCAAGATGTCCCTTAATGTATAACTTAGCCTCAGATTC
CATACAACTGTCACCCAAATACCACCAAGAATGAGCACCCAGGAACCCAACTGGAACCTTTTCTGAACAGAAACCAA
CTTATCTTCGTCGATTTTGAGGTTGATAGTAATTTCAGTTATTGACTGTTTTGGCTTTTAACTATGGGAGGTATTAG
GAAACTCTCAGGGAAACAATTTGGAAAGCAGCAGTGAGCTAGGCCAAATAGCAAGTTCTGGACCTGTGAGGAGAAAG
AACAGAGTAAGCAAACCTCAAGATACTCAAGGTAGGCACTCGTGGTGTTGGAAAAGAGGGTCACCTACTGGCATTAG
AGCAGAGATCAGTTAGATTTGTTTACCCATAAGTCTGCATAGCTCCTGAACAAGGTGGGAAACTTACTTTTTTGTGG
TCTTTTTCTAGCATGCTGCGAAGGTGCATAACCACATTTAGTTGGAAAGAGACTTTACTGTATTTACTTATTTATTT
GTTTTTAATAGAGTTGGGGTCGTGCTATGTTGAACTCTTGGCCTCAAGCAATCCTCCCATCTCAATCTCCCAAAGTG
CTGGGATTACAAGCATGAGCCACCATGCCTGGCCACTTTACATATTTAATCCAGTAACATTACACACGCAATTGCCC
ACACCCCCATAGGTAGTCCCCAGGTCTTGCATACGGGATGCCTGGAAGCAAAATATGCCTTTTGCAGCCATTATTCA
GATACATTTCCTATATTTAGTAGTGATTATGTTATTAGCTAGTTAATAGTATGTTATTACGTACTGTTATTATATTA
ACTAACTAATAACATAATCACTACTAAATATTTCCAGTGAGTGCAAAAAAGCAAGTGGCAATGATGTCTAGAATATC
AAGATATAGCTTTCCACTCCTCCTTTGGGGTTTCTGGGTGATTCTCATTGGGAACATGAAGAGGCATTGGCACCAGT
GAAATTATTTCCTGATTTTGGGGCGTTGGTTCAGAAACTCAACAACTCCTTGTTTTTTTTGTTTGTTTGCTTGTTTT
GCTAGAGTATAAGCCTTTGCTAAAGCCATTCACAGATTATAGTCCTATGGATTTTCTTGTAAGGAAAGGGAAAGGGT
TAGGACAGCAAGAAATGGGGAAGAAAGGATAAAAGATAATGCTTTCATGATGGAAGAGAAATCTTGATCCACAATCT
TGGAAAAGCTGTCCGCATATAAGATGCCAACTGCTTCTGGGGAAAAACTTCCCTGGTCAGCTTTGCCTTAAGGTCTC
CAACAGACATACAGTTCTAGGAGTCTAGAAGGGTCCTTTCCAATGGAGAGATGTGGATCCAAGATCCGAGACCCTGA
CATTTTGCTACAGAGAAGAACTTGGCATTGTCCTTCCCAATGGAGTACAAGGAACAGTCTTAGAAGAACTTGGTACG
GTCTCTTCCAATGGAGTTCAAGGACAGTTTGTCTGGTGTCATTTCCAAAGGGCCCAACCTCTAAATTCTAGATCATG
AAAGGTCTGGTTGTCATCAACCGATGTGTCATCAATGACTCATTTTACCTGGTGAAAACATGCTTTGGCATAAAGTA
TTATAGCCTTGCATTATTGAGTCATATCAGAGTTTATAAGAGTGGGAGATACATGAGATTCTATTATTAGGGGCATA
GGCCCTCTATTACTATTTTACAAGAGATCTATCTATGTCTTTCCAGTAGGAGTGGATCTGATTGCCATCAATCAATA
ATACCTGAGACCAAGGGACTCCAATCAATTCAGCATGCTTTGCCTAATGATATTTGTTTGTAATACTGTTGCGGGAC
AATCAAAGACTGGAGAGACCAAAAAAGGTTCAGGAGAGTTTATTAAATTAAGGTGATCACCGGTTCAGCCAGACATA
CATCCAGAAAGTCTGAGCCCCGAACAAAGGCTTTTCCTACTTTTAAACATATTAAGGTGGGAACTACATGAGGCAGG
AAGCCAGTTTCAGAAGTGAGAAACAAAGCAGTTAAATAACATTTCTTACATCTTGAGAAAGACATGTCTTGCAACCT
AACCTTATCGGTCCGGTGACCCTGCAGCTGTGCAGGAACTCACTGGGCCTGTAATAAACTTTGAGGGATGTGGAGTT
GGGGAGTATAGGTAAGGTCCACTGTCCACAGAGAGAAGACAGGCTGTTAATATTCTCTTTTAACTTGAATGTAAGGT
GTGGTCATACTTTGCAGCAACCTTAAGAGGATTTTAAAATTTATATTACTACTACTATTAGGTTATAGTTGATTTCA
TTAATTCCTTCTTCAATACCTTATTTAACTGTTTTACCACTTGTCTAGTGAAACAAGTACCTCTGTCACTGGAGAGT
TCTCCAGGAATGCCCAGTAAGGAAATACATTTTCTAATAACCTTTTATCTACGGTTATGGCATTGATTGATCTTTGT
GCATAGAAATGCTTTAATACAACCAGAAAACATGCAATGAAGCTGGCAGTTGAATTAACTCCAGCTTCAAGTGTTCA
AATGATCTACCAAGTGCCAGAAATATATCACCTGAGGTTTTTGTTGTCTTACTAGAATTATGGATTTGATAAACCAA
ATATTAGTTATAAACCATTTAGTAATCTTAGAATAGTCACCTCATCAATATTTTTTCACTGTTTGGATCATTTTCTC
TCTTCTATGATGAGTCATGGAATACGGAGCTTTTAGTAATGGAAATTTTAAGAACTCAGGAAGGACCAGGCGGCCAT
CTAGGGTCTCCATGAGTGCATGCTTCACATTGGAATTACAGACTCTAAAGTACAAATTTTAATACAATGAGTTGCAA
TTTATGCTTCTCTAATTCAGGTACATAACACTGGTTTATTAAATAGGTTATCATAGGTAATTTGATGGTGCCATTGC
ACTCCAGCCTGGGTAACAGATTGAGACCCTGTCTCTGAATTGGAACTGCACGGGGGCACTGTCCTTGGAGGGGTGAA
TGGGCATGAAGAGGTGTCTGGGTATGAGCCACAGGTATAGAATTTCACTCTTCTCTGCCATCCTCTGTTACATCCTG
GGTACCTGCCTGCCACTGAAAGAATGAGGTAAAAGAGGTGGTGGCACGAATCAAATAGATCTTGCTGTGCCAATGAG
AGAGAGCAGACTAGCCCATGTCAGTGCCAGGAGAGTGGAGGAGAGAGGGAGAGCAGGAGAGGAGTGTGGGTAGGGAG
TGCTCATCAACAGTACACATAGTGCCCTATACCGGTAACTGCCACTGGCTCAGTATTTACCTGGGTTATCACTGCTT
ACCATGCCTGATTTTATGATTAATTATCTACTTATCATTACTAATCCATCAACCCACTTTCCAATGGGAGAATTAGA
ACACTGACAATACCTTCCAGCTCCTCTTCCCCTTCCCCCTCCCATGTTGACCATACTCCTGAATCTTAGGCTCGTTA
TCCTTTTACTATTAATAGAGTTATTTTTTTAATTTCTGATCAATGGTCTTTTTAATGATACCAAGTACAGAGTATAT
ATGCCAATACTACTATGAATTTTTAAATTATTTGCTCAGACAGAATACATGGACATACAAATGATGAATGTGATAAT
TGTCATACATATATATTTATCTTAGACACTTAGTCAAAACATGTGGTCTTTGGTTATCAGTTAGACACTGTCACTTT
ACCTGGAAGATACAAGGTAATTGGTCACAGACTCTCAAATTATGAAACATTTAGATTTTTCAGGGGAATGACATGGA
GGGAGCCAAGGAGTCTTATGATTAGATAAGATGTTGTTTGGGTGGCTCACGACACCACTGGGCAACACTCAAAGAGG
TGGTGGCTTATACCTGTAATCCCAACACTTTGGGAGGCTGAGGTGGGAGGATCGCTTGAAGCCAGGAGTTAGAAACC
AGCCTGGGCAACCAAACAAGACCTGGCTCTACAAAAAAGTTTTAAAAATTTAGCCAGGCATGGTGGCATGTGCCTGT
AGTCCCAGCTACTTGGGAGACTGAGGCAGGAGGATGACTTGAGCCTTGTAGTTTGAGGCTGCAGTGAGCTATGATCA
CGTCACTGCCCTCCAGCCTGGGCACAGAGCAAGACCCTGTCTCTTAAAAAAAAATCATCTGCAATGTGAGGAGTGAT
AACATTTAGGAACGTGTGTATAGGTTTAAATGCTGGTCAAAGACATCCTACACAATTCGCTGAACCTTCTCTCTAAG
GGTTTTTTCCCAAGCTCTGCAGACGCTATCTGGGCACAAATCATGCCTCTGTTAACAGAATTTGCTGTTCCTTCTAG
CTCTTGGTATCCCACTGCCCGCTTTCTTTATGAAAGCTGGTATGGTCATTGAATATCCCAATCCTTTACAAATTTGG
AAACAAGCAAAACTGTCAATGAAATTTGTATTTGCCTAAAATGAGTTTTCTTTCTTTCTTTTTTATTATTATTATAC
TTTAAGTTTTAGGGTACATGTGCACATTGTGCAGGTTAGTTACATACGTATACATGTGCCATGCTGGTGCGCTGCAC
CCACTAACTCGTCATCTAGCATTAGGTATATCTCCCAATGCTATCCCTCCCCCCTCCCCCCACCCCACAACAGTCCC
CAGAGTGTGATGTTTCCCTTCCTGTGTCCATGTGATCTCATTGTTCAATTCCCACCTATGAGTGAGAATATGTGGTG
TTTGGTTTTTTTGTTCTTGCGATAGTTTACTGAGAATGATGATTTCCAATTTCATCCATGTCCCTACAAAGGACATG
AACTCATCATTTTTTATGGCTGCATAGTATTCCATGGTGTATATGTGCCACATTTTCTTAATCCAGTCTATCATTGT
TGGACATTTGGGTTGGTTCCAAGTCTTTGCTATTGTGAATAATGCCGCAATAAACATACATGTGCATGTGTCTTTAT
AGCAGCATGATTTATAGTCCTTTGGGTATATACCCAGTAATGGGATGGCTGGGTCAAATGGTATTTCTAGTTCTAGA
TCCCTGAGGAATCGCCACACTGACTTCCACAATGGTTGAACTAGTTTACAGTCCCACCAACAGTGTAAAAGTGTTCC
TATTTCTCCACATCTTCTCCAGCACCTGTTGTTTCCTGACTTTTTAATGATTGCCATTCTAACTGGTGTGAGATGGT
ATCTCATTGTGGTTTTGATTTGCATTTCTCTGATGGCCATTGATGTTGAGCATTTTTTCATGTGTTTTTTGGCTGCA
TAAATGTCTTCTTTTGAAAAGTGTCTGTTCATGTCTTTCGCCCACTTTTTGATGGGGTTGTTTTTTTCTTGTAAATT
TGTTTGAGTTCATTGTAGATTCTGGATATTAGCCCTTTGTCAGATGAGTAGGTTGCGAAAATTTTCTCCCATTTTGT
AGGTTGCCTGTTCACTCTGATGGTAGTTTCTTTTGCTGTGCAGAAGCTCTTTAGTTTAATTAGATCCCATTTGTCAA
TTTTGTCTTTTGTTGCCATTGGTTTTGGTTTTTTAGACATGAAGTCCTTGCCCATGCCTATGTCCTGAATGGTAATG
CCTAGGTTTTCTTCTAGGGTTTTTATGGTTTTAGGTCTAACGTTTAAGTCTTTAATCCATCTTGAATTGATTTTGTA
TACTAAAATGAGTTTTCAAAAGGATCTTTGTGGCTACCTTATTAGTTCATAGAAAGTGGAGGCTTGTCTGGAATGAT
ATTAAAGAATTTTTTTCATTTTAATTGTTTTAGAGACAGGGTCTCAGTCTGTTACCCAGGCTGGAGTACAATGGCAC
AGTCATAGCTCACTGCAGCCTTGAACTCCTGTGCTCAGGAGATTCTCCCACCTTAGCCTCCAGAGTAGCTGGGACTA
AAAGTGTGAGCCACCATGCCCCACTATTTATTTTTGTAGAGATGTGTTTGGGGGACGGTCTCACTATGTTGCCTAGG
CTGGTCTCGAACTCCTGGACTCAAGCAATCCTCCTGCCTCAACCTCCCAAAGCATTGGGATAAGTTTTGCATAGACA
TGTTTGACCCTCTCCCTTCCTTTATTGCAGCAAAGATTTCCATTTTCTCACAGGGAGGACTTGGGGCAAATTGTTTT
TGTCGTTGTTATTGTTATTTGAGGATGTGGGTGGGTCATCTTGGTTAATGTCAGTGCAAGAACGGTGTCTGCTCCTC
ATTATTGGGGTTCCTTAGCTATTCAGGCAGGCAGCAGCTCCCTTGAGAAGACTTCCTGACCCCCAGGTCCCCATCAT
ATGCTCTCATACACCAGCTGCCCCTCCTTACTGAGCCTATGTCCTTGATAGTGCTGCATTTACCTGTGATCCTGTGG
CTGAGCTCTCCCTCACACTTCCAGACAAGGAAGGCCTGTGAGGTATCAGCACAGTGCTGAACATAGTACCTGGTACA
CAATAGGCATTTAGTAAATATGTGAACAGGAACAAATGAAGGAGTCAGTGAGTGAAAGCTCCAAGCCTGACTCAGCG
GAACTGGCAGTCGGCCAGGGCCTACAAAGTGCTGCCTGGCCCTCAGTAGGGGGTGGCAGATCTGGGGATCCCTCTTC
ACCAAATAGAGTTGCATCATACAGGTAAAGGTCCCAAGTGCCTATTGTTTTCTTTTCATCATTTTCCATGTGTGACA
AGAGTATCACGCAATCATGTGAATCAATGGACTTAGTTTTCTCACTAGACTAATGTGTCTAGGAATTATCTGTGTTG
TCATGGGGATTTTCCAGGTGTCATTTACAACTACCTGTGGACAAGATGAGGTGCTACCCTCATCTTAGAATTAGGGA
TGGTGGCTGGGCATGGCAGCCCATGCCTATAATCTCAGCACTTTGGGAGGCTGAAGCAGGTGGATCAACTGAGGTCG
GGAGTTCGAGACCAACCTGACCAACATGGAGAAACCCTGTCTGTACTAAAAAACACAAAACTAGCTGGGCATGGTGG
CACATGTCTGTAATCCCAGCTACTCGGGAGGCTGAGGCAGGAGAATTGCTTGAACCCAGGAGGCGGAGTTTGCCCTG
AGCTGAGATTGCATCATTGCACTCCATCATGGGCAACAAAAGTGAAACTCCATCTCAAAAAAAACCCAAACAGAAAC
AAACAAACAAACAAAATTAGTGATAGTGATGCTCAGCCTGGGGAAAGCATTTGTCCAGTGGCACACAACTGGGAAAA
GGGGAAGCTGAGATCCAGCAGGAGGTCTGTCTCCAAAGCCCTCCTAGACTAAAGCTGCTTAACAATTTGTGGATTAT
GAAATTCTCATAGAGTTTGATTAAAGCTGTGGCCCCCTCTTTTCCAAATAGGCACATACATGTTTGCATAAAGTTGT
GAGGCTTCACACACTCCCTAAAACTCTTTCATAAACCTTCCAAGGATCCTCTAGGTATTCACGACCATCTATTATGA
TTGCATCTCTTGGGGGTGGGGTAAAGAGGGAGGGCATGAGCAAGTGTGCATCAGGGCTGAGGAAGGTGGCGCTGTTG
CTTCTCCATTTCCCAATAAGCTTCCAGATTCTTTTTGATGTCAGAGGGATGTGGGCTCGTGTCTCAGATTCAACCCG
TATGCATTGAGTCACAGTTTTCTCTTCCGTCAGTTAAGATCATGACAATGAGAATGTGTGCCCCTAAGGTGGTTGTG
AGGATTAAATGGGATATTGCATACAGCTAGTATATAATAAGTGCTCATTAAATGGCAACTACCTTGATCCACTCATT
CATTTATTCACGAATCCAATAACAATTCACTGGGCACTTTCTATGTACCAGGAAATAGTCTAGGAATTGATGATGTG
GCATCTTGGACAAGACATACGAGGTCACTGCGCTTATGGACATTCCATTGGCAGAGACAGATAAGCAAAAAATAAAC
AGATAAGGAAATGTTAGGTGGAGAAGAGCTACAATTAAACTAAAGCAGGGGGATATTTCAGACAGTGATGAGAACTA
CGTTAGATTGAGTGGTTAGGGGAAGACTGTCTTGTTTTTTTTTCTGAGCAGAGACAATGAAAGATTCAGGTGGAAGG
CACTAGAAGGAGGCAGGGGTGGCTACAAGAATCCTGAAACAGGAAAAATGTCAGAGAACAACATGGAGGAATGAGTG
GGAGGAGAAGTCAGAGCGGTAATAGGGCCACGTCATGTAGGACCATGTGAACCCTCAGTGGAGACTTCAGATCTTAT
TCTCAGCAAAGTGGGAATATTGTAGGCCTTGGTGAGCACGTGGATATTAATTATTTTACATTTTAGTGGGGTTACCC
TGGCTTGTGGGGCAGTGAAACAATTGTTAAGTGGAGTAAGCATGTCATCCAGAAGTCCAGTGAAGGGGCTTTGCAGA
GATCAATGCAGGGCATTTGTAAGTAAACTTAACAAATTTTATGACTTTTATGTCAAGTTTTTATTGAACTTGAACAT
CACTGTAAAAAGCGCACAGCTCAATGAATTTTCACAAACTGAACATACTCATGTAATTGACATGCAGGCCAAGTAGC
AAGAATGCCCCGAAACCCTGCACCCTGTTCTTTTCTATTCACTATCCACCTACCATCTTGATCATGGGTTGATTTTA
TCTGTGTATGAACTTCTTTTTTGTTTTTGTTTGTTTGTTCCTGAGATTGAATTTTGCTCTGTCGCCCAGGCTGGAGT
GCAGTGGCACTATCTCGCCTCACTGCAACCTCCGCCTCCCCGGGCTCAAGCAATTCTCTCGTCTCAGCCTCCCGAGT
AGCTGGGACTACAGGTGAGAGCCACCATGCCTGGCTAATTTTTGTATTTTTAGTAGAGATGGGTTTTCACCATGTTG
GTCAGGCTGGACTCAAACTCCTGACCTCGTGATCAGCCTGCCTCAGCCTCCCAAATTGCTGGGATTACAGATGTGAG
TCACCACGCCTGGCCCTGTGTTTGAACTTCATACACATAAAATTATGATGCATTGACTCTTTTGTGCCTAGTTGCTT
CCACTCAACATTATGCCTGTGAGTTTCAGCCACGTTGTCGCCTGTAGCTGTGGTTTGTTCTTTTTTGTTGCTGTATA
CTAGTCTATTGTGAGAACCCTCACTGATTGTCTATATCTATATTGATGAGCATTTTATTAAGAAAGCTTCTGTGAAT
ATTTTGTTCATTTTTTGGTGAACACACATACACATTTTTGCTGGGCATGTACCTGGGAGTGAAGTGGCTGGTTTCCT
GGGTATCCATTTGTTCAGCTTCAGGAAATACTGCCCAGCAGTTCCCCAAGTGGCTGCACAGTAATCCCACCTTATCC
ACTGGAGATATCTTCTGAGACCCCCAGTGGATGCCTGAAACCCCACATAATACTGAGCACTATGCATACTCTTTTTT
TTTCCTATACAATCACATTATATAGGGAGGGTGGTATACACAGTGCAGACATGGTGGACAAAGGATGATTCGTGTCC
GGGGTGGGACAGAGTGGATGGTGAGAGATATCATCATCCTACTCAGAATGATGCACAACTTAAAACTTACGAATTCT
TTATTTCTGGAATTTTCCATTTAATATTTTCAGACTGCGATTAGCTGCAGGTAACTGAAACTGCAAAAAGCAAAACC
ACAGATCATAAGAAGTATGCGGTGGGGGTGATATTCATCGTATTTTATCAACCATCTTTACTGTTTAGGGCACAAGC
CAATCAGAGCAGACCCTGGCTGGGCCACCCATTAACCTAAGCTTGTCCAACCTGCCTTATTTTGTTGTTGTTCTGTT
TTGTTTTGTTTTAGCTTTTTAGCAGCCTGAAGCCATGGTTTTCAGTTTCTGTCTCCAGTGATACACAGAAAGGAAGG
ATGAGGAAGGGGCTTTACTGGCCCAACCAGAAACGGAAACTAAGAACCCATGACTGTATTCTCTCCCTTGGACAGCG
TTAACCATTAACCCTTAATTGCTGGGTCCCAGCAGGGGAAAGGGCAGCCTGGGGAGGCGGATGTTGGGGAGGGGCTA
ATTACCAATCTGGTATGTAAGTATTTTGATAGTTTTACAAATGAGGTGTATGCTGACTAACAGCCACCCCTGGTGTG
GATGTGATTGGCAGTTCCGAGAGAAATATGGGGACGTCTTCACGGTACACCTGGGACCGAGGCCCGTGGTCATGCTG
TGTGGAGTAGAGGCCATACGGGAGGCCCTTGTGGACAAGGCTGAGGCCTTCTCTGGCCGGGGAAAAATCGCCATGGT
CGACCCATTCTTCCGGGGATATGGTGAGAGCCTCAGAGGCACTGGGAGGGGGCGGGTGGGGGGTGCATCAGGGAAGG
GAGTATATGGGAGGAAGAAGGACTCAGAGCCTTCTTCCAACTTCTTCTACAACCAACCCACACCTCCCCTGCACCCC
AGGTGTGATCTTTGCCAATGGAAACCGCTGGAAGGTGCTTCGGCGATTCTCTGTGACCACTATGAGGGACTTCGGGA
TGGGAAAGCGGAGTGTGGAGGAGCGGATTCAGGAGGAGGCTCAGTGTCTGATAGAGGAGCTTCGGAAATCCAAGGGT
GAGTCCTGGGGGATGAATAGGAAAGAAAGACAATGAAACACTGAGAGATGCAGGTGCACGGGAATAGAAAGACAGAG
AGGTATATAAGGGCACAGACAGAGACAGACGAAACTGGAGACACCATCAGACAGAGGGATAGAGACAGAGAGGGAGA
GAGACAGGGGAATAGAGAGGGATGGGGATGGGCAGGAGAGAAACACAGAGAGCCAGGGAAAGAGAGAGATGCCAGGT
GTATAATGTCCAAGAGTTACTCAAAGAGGCTGGATGTGATGACTCTCACCTGTAATCCCAGTACTTTGGGAAGCTCA
GGCAGGAGGATTGCTTGAGGCCAAGAGTTGGAGAACAGCCTGGGCAACATAATGAGATCCTGTCTCTACACAATATA
GAAAAGAAGTGAGCCACGCATGGTGGTGTGTGCCTGTAGTCCCAGCTACTCAGGAGGCTAAGGTGGGACTACAGGAT
CACTTGAGCCCAGGAGGTTGAGGTTGCAGTGAGCTGTGATTGTACCACTGCACTCCAGCCTGGACAACAGAGCAAGA
TCCTGTCTCAAACAAACAAACAAACCCTCAAAGACATATAATTTCATGGATCAATTGTGTCTGTCAAAGTCAAAAAC
GGAAGTTAAGTAAAAGAAAAAAACTACAGACATTTAACAAATAATGAACTGTGTTTTCCTTGCCCTGGGTGAAGTGC
TGATGAGCTGGCAGTGAGCAGACAGGCCAGGTGGGGTGTTCTGCCCGGGTGCAGCTGGAGGGGTCATCAAAGAATCA
CTAGGTTATTTTTGAGTTCTCCATAACTTGGTGTCTGTGAGACATGTAGGTGAAGGGTCTCTGGCTAGCACCTCCAT
CTCATTCATGCCAGGTGTTTACCATCTCTCTTATCAAAATTTCTCAAGAGACTCTGGGATGTAAATGCAGAGGCTGC
ATGGGGAGGTAGAGACCCAGGAGCTATAGGGAAACGGGGACAAGAAGACTGAAGAGAAGGACAGGAAGAAACAGTGA
CACAGGCAGGAGGAAAGAGACAGATGGAGGGACCAAAACAAAAAAATATAGGTTGGGTATGGGGCTCATGCCTGTAA
TCCCAGCACTTTGGGAGGCTGAGGCTGGCGGATCATTTGAGGCCAGCAGTTCAAAACCAGCCTGGCCAACATGGTGA
AACCCCATCTGTGCTAAAAATACAAAAATTAGCCAGGCTTGGTAGCACGTGCCTTTAATCCCAGCTACTCAGGAGGC
TGAGACAGGAGAATTGATTGAGCCTGGGAAATGGAGGTTGCCGTGAGCTAAGATCACACTACTGCACTCCAGTCTGC
ATGATAGAGTGAGACTCTGTCTCCAAAAATAATAATAATAATAATAAAATAAAGAACGGCAGGGGGGAGACAAATAT
ACACACAGAGAGACAGAAAGAAACAAAGGCAAAGAGAAATTGAGGCAGAGAAAATTAGAGAGACAGACAGACAAAGC
TTAGGAAAAGGTCTGCAGAGGAATGAGAGAAGACAGGCAAGTGAGAACCAGAGAGAGGCTGCACTAACCTGATGTTC
TTGGGTCCTTACAGACCACTCTCCCTCCAGCTGGGGCCAGTGCTGAGCCTGGTGTATACAGGTATCACTTAACAAGT
ACAGAATAATTCCCAGAAGACTGGAGAGCCCTAGATGTGGAAAGAAGAGATTAAGGGGGAGTAATAGGTAGGGGTGG
AAAGATGGTTTTTTATTTGTTTTAAATTAGAGACGGGGTCTCACTCTGTACCCAGGCTGGAGTGCAGTGGCACGATC
ATAGCTCACTGCAGCCTCAAACTCCTGGGCCCATGTGATCCTCCCACTTCAGCCCCTGGACTATTTCAACTGGGACT
ACAGGCATGTGCCACCATGTCTAGCTACATTTTTTTTTTTTTTTTTTTGTAGAGACAGGGTCTCCTTATGTTGCCCA
GGCTGGTCTTGAATTCCTGATCCTTTTGAATCAGGCTCCCGAAGTGCTGGGTTTAGAGGTATGGGCCCCTGTGCCCA
CCCAGGGCTTTTTAATTTATATAAGCAATTGATTGAACACCTACTCTGCCCAGCCCCTATCCCTGGGATTTAACTGT
ACTCACTCCCAGAGTCAGAGGTGGGGCCTGAGAGGAGGTGCAGAGTGAGAACCGGCTGCATGGACTCTATAGCTGTG
TTGCCTGGGTCTAAATCCTGGCCTCAGTAATGAGTAGCTGTGCAACTTTGGTCAAATTACTCAGCCTCTCGGTCTGC
CCATCTATAAACTGGAGCTAATAATCAAATTGCATCTGCCTCACATTGTTGTAGTGAGAGTTCAATGGAATTACGCG
TGACGTGCTGGTACATAATTAGCTGTTACGGTTATTCTCATGTTTACCATTACTGAGTGATGGCAGACAATCACACA
GAGATAGGTGACAGCCTGATGTTCCCCAGGCACTTCAGTCTGTGTCCTTGACCTGCTGCTTCTTCCTAGGGGCCCTC
ATGGACCCCACCTTCCTCTTCCAGTCCATTACCGCCAACATCATCTGCTCCATCGTCTTTGGAAAACGATTCCACTA
CCAAGATCAAGAGTTCCTGAAGATGCTGAACTTGTTCTACCAGACTTTTTCACTCATCAGCTCTGTATTCGGCCAGG
TCAGGGAGACGGAGAGGGACAGGGGGTGTGGGGGTGAGGTGAACACCCAGAACACACGAGAAAAGGATGACCTGTCT
TGGGGGCTCAGAAATGCAGCTTATCCTTGGAAGAAACGCAGACATGTGAAGAATCAGGGACATGGAGACCTGGAGGG
AGGAGAGACGGTGAGACAGGGATAGAGACACTGAGAGAGAGAATGAGGCGTGATGGGGAGGCAGAAATAGAGTCAGA
GAGAGACTGAGAGAAGGAAGATGAGCAAAAACAAGACAAAGAAGAGCAGAAATCAAGAGATTCTGAGAGACAGAGTT
GATGAGAATGAGTGTGAAAGAGAGGGAGAGAGAGAGAACGAATAAGGCTTTGGGCTTCATGTCTATTCTGCTCCTGG
ATGTCATTTCTGTTTTATTTTTTTTAGACGGAGTCTCGCTGTTTCATTCCAGCTGGGGTGTAGTGTTGCCATCTTGG
CTTACTGCAACCTCCACCTCCCGGGTTCAAGTGATTCTCCTGCCTCAGCCTCCCAAGTAGCTGGGACTGCAGGCATG
TGCCACCACACCTGGCTAATTTTTTTTTTTTTCTTTTCGAGACAGAGCCTCGCTCTGTTGCCTAGGCTGGAGTGCAG
TGGCACAATCTCAGCTCACTGCAACTTCCACCTCCCTGGTTCAAGCAATTCCCCTGCCTCAGCCTCCTGTAGCTGGG
ATTACAGGCGCCTGCCGCTATGCCAGGCTAATGTTTTTGTATTTTTAGTAGAGACGGGGTTTCGCCATGTTGGCCAG
GCTGGTCTCTAACTCCTGACCTCAAGTGATCTGCCCGCCTCAGACTCCTAAAGTGCTGGAATTACAGGTGTGAGCCA
CCATGCCCAGACTGCTTCTGGTTCTTCTGTATCCTTGCTTCTCAGTCTTTGGTAAAGCTCTCCACCTAAAGAAAATG
AAGGATAAATGACAATAAGGAACAGCATTTCTTCATTTTCTCCCATTTCTCCTTCTCCCTCTGTGTTTTTTTTTTTA
ACTTTCCCCAGATTGTAAAGGCAGTCTTCTGCTCTTTTAAAACAAAATACTAAAATGTCTCCTTATTTATTAACCTG
GAAATATGCCTATTACATATTAAATTTAAGAATATCAAGCTGCAGAACAGTATGCATAGCTGTAGTTTGTTGTTGTT
GTTGTTTTCAGACAGTATCTTGCTCTGTTACTCAGGCTGGAGTGCAGTAGTGTGATCTCAACTCCCTGCCACCTCCA
CCTCCCAGGTTCAAGCAATTCTCATGGCTCAGCCTCCCGAGCAGCCGGGACTATAGGCGAGCGCCACCACACCCAGC
TAATTTTTTTGTATTTTTAGTAGAGATGGTGTTTCACCATGTCGGCCAGGCTGGTCAACATAGCTACAGCTATTAAG
CAGGGATGTATGTTGGATTCACATGTGGGGTTGTCACAGTTATGGATTTTCAGGACCCTACTTTCTGGGCGGTCTGA
TCTGGAAAGTCTGGGATGGGGCCCAAGGTGAGTACTTGTAACAAGCCCGACCAGTAATTCTAATGTTCTCCTCCCAC
CGAGAACCACAGAGAAAAGTCTGGAAGGAGACCCACCAGACAGTTAACAATGGTTATCTCTAGAAGGAGAGATTAAG
AAGGAAATTTACATCTGACTATATATGTTTGCATTTTTGCAATTATTTGCAATAAATTAGGCATTCCATTCTTCATC
AAAGTAATAGAAATAACCTCCAAAATACGTAGTCCTAACATGTCAGCAGGCTTATCTTGTGTAAGAATCATTTTATT
AATATCTGACACAGCAAGGGAGATGAGGAGAGGTGGGAAGAGGGAGAGAAAAGTATGAGAAAGACAAATAAACAGGC
TGAGGTAGACAATGGGTGACACAGAAAGGAAGTGAGACAGAGACTAAGAGAGATAGAAAGGAGAGAGGCAGGGAGAT
GGGGCAGAGGCCAAGAAAAAGACAGAAGGATGAGGGAGGAAGATGCAGAAAGAGGTAAATGTGAGATAGATCAAAGG
AGATATAGAGTCAGTGAGTGAGGGGTTCAGAGGCAGAGGGGAGTGGGGAAGTGGGGTTCCCATGGAGGGATTGGGGC
CCAGGAGGCGCTCTCTCCCTGTGACCTGCTAGCTCAGCCCTAGGCAAACCTCACCACCCCTTCTTTCTTGCAGCTGT
TTGAGCTCTTCTCTGGCTTCTTGAAATACTTTCCTGGGGCACACAGGCAAGTTTACAAAAACCTGCAGGAAATCAAT
GCTTACATTGGCCACAGTGTGGAGAAGCACCGTGAAACCCTGGACCCCAGCGCCCCCAAGGACCTCATCGACACCTA
CCTGCTCCACATGGAAAAAGTGGGGTCTGGGAGAGGAAAAAGGGAAGGGAGGGGAGGGAGGGCAAGATGGAGAGGTG
AGAAGAGGGAGGGAAAAGGGGTAGGGAAGGGGAAGATGGGGAGGGAAGAAGAAAGACTAGGGAGGGGAGAATAGGGA
AAGGGAGGAGAGAACATGAGGAAGGAAAGAAAGATGAGGTGAAAGGAGGGAGAAAATAGGGAGGAGGAACTGAGACA
GGGAGAGAGGGGAGGTGGGAAGACAGAATGAAAGACAGAGGGAGAGAGAGAGAAGACTGGCTGAGGAAGGAATTCGG
GGCAAGGGACAAAAATACAGCAACAAGAGAAAAAACTCACAGAGGCAGAAAGAGACGGGGACAAAAAGAGAGAAACA
CATCAAAGAGATGTGGAGAGAGATAGAAACAGAGTTAGGAAGACTAAAGAGAGGCTGAGAGAGATGAGTTAGAGATA
CGCGGTTGGATGTGTAGAGGACAGAGAAAAGCAAACTGGGCCAGATAGTGTCAAAGACCTTTAGGCCAACGGAGGGC
AGCCAGGGAGATGGGCGTATACACAGCAAGGCTACAGCCTCCCCTGACCCTCCCCTTCCTTCCCTACTGTGGACGCA
GGAGAAATCCAACGCACACAGTGAATTCAGCCACCAGAACCTCAACCTCAACACGCTCTCGCTCTTCTTTGCTGGCA
CTGAGACCACCAGCACCACTCTCCGCTACGGCTTCCTGCTCATGCTCAAATACCCTCATGTTGCAGGTGGGCCAGGG
ACAGCCAGTCAAGGGGGTCTTCTGACCTCCTTCTGAGCTGCAGAAATGGGGCTATGGGTACCACCTGGATGAGAGAG
GGGATGCTGGCTTCCTATTCTGGGAGCACTGTAGGCTCTGGGCTAGATTCCAACCAAGCCAATTCTGTTGGTGGATG
CATGGATGCATGAAGAATCTGTCCATGCGTTCTCCCACTGTTTTCTTCCATCACTTAAGGATTTTTTGTTCTAAGGT
TTTTGTTTGTTTGTTTGTTTTTTGTTTTTTGGTTTTTTTTTTTTTGTCTTTTTTGAGACAGAGTCTCGCTCTGTCAC
CCAGGCTGGAGTGCAGTGGCATGCTCTTGGCTTACTGCAAGCTTCACTTCCAGGGTTCACGCCATTCTCCTGCCTCA
GCTTCCCGAGTAGCTGGAACTACAGGCGCCTGCCACCACACCCGGCTAATTTTTTGTGTTTTTAGTAGAGATGGGGT
TTAACCATGTTAGCCAGGATGGTCTCGATCTCCTGACCTCATGATGTACAAATTTAGGGGGTACATATGCAGTTTTG
TTACATGCGTAGGTTTTGTAATGGTCAAGTTTGGGCTGTTAGGGTATTTATCACCCAAACAGTGTACATTGTACCCA
TTAAGTAATTTCTCATCATTCACCCCCCTTCTGCTCCCTCACTCTTCTGAGTCTTCACTGTGTATCATTCCTCTCTC
TGTGTCCATGTGTACACATTTTGTAGCACTCACTCATGAGTGAGAACATGCAATATTTGACTTTCTGTGCCATCACT
TAAAAATCGATCCATCCACTTATCATTTCATCTATTCATTCTTTAATTCATTAATTAAAGAATGTATAATTACTGAT
TCTTTCATTTATGATTCATCTAAGGACATATACTGTCATTCATTTATTTGGATTACTTGATCCACAAGTTGATCCTT
TGAAACAGTGGTATGTTGATGGACTATTTGTCATTGATTCATTGGCTCATTCATTCATTCATTCATGCATTCATCCA
TCCTTCTACGAACTAGGTTTCACTCTTATCCTTCCATGAGTCAACCTTTCAATTCACCCTTAATCCATCCGTGATTT
CCTTCATTTATCACAATAATTCACTCATTTATTCACCTCTGATCTACTTATCATTCAATCCAGCCTTTCATTTACTC
CTTTATTTACTCATACTTCACTAATTTAATTATTCACTTGCTCTTCCATAAATCTAGCCATTCATGTGATTATTCAT
TAATTGGGTTCATTGATTTCTTTGTCTATGGATCATTCATTAGTGATTAATTAATCAATCCATCTATTAATTGATAA
GTAAATACAGACATCCATTTATTGGTTTGTTCATTTATTCATCAATCTTTCCATCCATGAATTGATCTATTGATTGA
TTGATTGATGTTTTTATCCAGTTGTTCATGAATTCATCTATTGTTCTATTACACTGTTATATACCTGAGGACCAAGA
ATAGTGTCTCAACTATATTATAAACACAATAAATATTAGTTCATTTTCTACTCATCTTAGAGAGGGTGTTTTGAGAG
GTTTGTAGCCTGGAGTTCTTAATCTGAAATTCCATGCAAAATCGTGGTGTGTGTGTGCATGTGTGTGTGTGTACCTG
GGCATGTGGGAAGAGGATCTGTAATATTCATTAGATTTCAAGCAGTGAGAATTCTTGTTGCTTCCTCCCTCCTCCCC
TCACCCCATGCTGATTACTTTGAGGGGTATCAAGGATCTAACCCTTTACTATAGGTTTTTCATTGGTCAATAGAAAG
TAGTGTCCTTGCTGAAAGGTCTCTTTTTAAAAAAATTTTTTTTTCTTTTGAGATGGAGTCTTGCTCTGTCACCCAGT
CTAGAGTGCAGTGGCATGATCTCGGCTCACTGCAACCTCCACCTCCTGGGTTCAAGTGATTCTCCTGCCTCAGCCTC
CTGAGTAGCTAGGAATACAGGTGTGCACCAGCACACCCAGCTAATTTTTTGTATTTTTAGGAGAGACGGGATTTTGC
CATGTTGGCCAGGCTCATCTTGAACTCCTGACCTCAAGGAATCCACCCACCTCAACCTCCAAAATTGCTGGGATTAC
AGGCATGAGCCACCATGCCTGGCCTGAAATGCCTCTTTAAAATGAGATTCATTGGTCTTCTTTTCTGTACAGAGAGA
GTCTACAGGGAGATTGAACAGGTGATTGGCCCACATCGCCCTCCAGAGCTTCATGACCGAGCCAAAATGCCATACAC
AGAGGCAGTCATCTATGAGATTCAGAGATTTTCCGACCTTCTCCCCATGGGTGTGCCCCACATTGTCACCCAACACA
CCAGCTTCCGAGGGTACATCATCCCCAAGGTAAGACCGGCTGGAACCCCATAGCCCTCCTGTTTGGGCATCCTGGAT
TCTCTTAATCCCCGAACTCAACCTTTTGTTAGCTCCTTAATTGAGTCCCGTTGTTTTTGTTTTTTGTATTTCTTTTT
TGTGGAGTGTGTGGAGGGTTGGAGGGAATGGCAATATCTTTTGATCTTGTGATCCTCCCTCAGGACACAGAAGTATT
TCTCATCCTGAGCACTGCTCTCCATGACCCACACTACTTTGAAAAACCAGACGCCTTCAATCCTGACCACTTTCTGG
ATGCCAATGGGGCACTGAAAAAGACTGAAGCTTTTATCCCCTTCTCCTTAGGTAAGCTGGACCCACAATTTCTTTCC
CAGACACCAGAGGGCAGGTACTATCCCCAACTTGAGAAAAACAACGAGAGATACTGATTATTTGAGCACTTAATATA
TTCTGATTGCTTCACCTGCCTTATCCCATTCCATCTTCACTACAACCCTATAAGGAGGCTTGAGAAAGAAGATTACA
TTCCCAAAGGCACATCTTGGCAAGCAGGACCTTGGGCAAGTATTTTAACATCTCTAAACCTCAGTGAGTTCATTTTC
TTAAAAAGAAAAAATCTGTTGGGCACCACTGTAAGCCCAGTGCTGTACTGGGGGCTGAAGATAATGCATCAAACAAG
TCACACAGAGACAGGGTTCCTGCCCCAGGAAATTTAAAGTCCAGCAGGGAAGATGGGCATTCATCAAATAATAATAA
AATAATCATCTCATGAAATGAATGAATGCCTGCAACATGCTTAGAACTGCCTGGCACAAAGGACATGCTCACAAGGG
CAATTATTATTATAATTAGACATAATTGTGATAAGTGCTCTAAAGGGAGCTTTGGGAGCACAAAATAGGAAATAGTA
GCTAATCTTGTGGTGGGTCCGTAAGGAAAAGCTTACCAGAGGAACTGGCTTCCAAGCTAACATGTTCATGGGTGAGC
ATCAATCAACCATTGCAAAGTGTGTTCCAGGCAAAGGAAACAGCAAGGACAAAGGCCAAAGGTAGAAACGTGATATG
GCACCATTGAGAACCTATAGGAAGTCCAGTGAGCCTTGGGTGTAGATTGCAGAAGGAAATAAGACAAAGGGCTCATC
TGGGCAGGACCTTGAAGGTTGCAGGAGGAGTTTGGATTTATGGTCTAGCACTGGGAAGGTGGAAAAGGTCTTGACGT
GCTCTGACTTGTCCCAGTTCTCATCCTCTACTCTTTGGCTGGTTAAAAGAAAAACTTTAGACAAATTAAACTTAGCA
GAGTCTATCTGAACAAAGAAACAATTCATGAATTGGGCAGCACAAGGAACCAGTAAAGGTTCAGAGAGCTCCATCCA
GCAATGTGGTCAGGCACTATTTATCCACAGGGAAAGGAACTGAGGTACTGAAACAGCCTGATTGGTTACAGCTCTGT
GTTTGCCTTATCTGAGCATGTCTGGGCAGCTTGTAGCCTGTGACTGGCTGAAGCTTGGCTGCCCTGATTGTCCAAGG
TTACTTGTTACAAGAATATACTCTCAAGTTTGTTTACATGTTGAGTTACATTACAATTTGTTATGTAGGGAGGCTGC
TTTAGGCCAAATTTAATTGAATTTAACATGCACCATCCATGAAAGGCCCCAGAAACAAACCCCCAGTCTTGAGTTTC
ATCAGTGACTTCAGTGATCCAGGGTTTGGCCCAGCCCCCGGTTTTGCGCAGTACAGTGACCTCCTTCCACATTTTAT
CTTCAATGAAAATTGGGAACATGTGTGGTGATGGCTTGAATGTCAATGTCTTCTCTCAATTTTGCTATCTGAAGTTT
CTTTTTTTTTTTTTGTCTTCAGACGGAGTCTTCCTGTGTTGCCCAGGCTGGAGTGCAGTGTCACGATCACAGCTCAC
TGCAACCTCTGCCTCCCAGGTTCAAGTGATTCTCCTGCCTCAGCCTCCCGAGTACCTGAAACTACGGGCGCATGCCA
CCATGCCTGGCTATTTTTTTTTATTTTTAGTAGAGACTGGGTTTCACCGTGTTAGCCAGGATGGTGCTGATCTTCTG
ACCTTGTGATATGCCCACCTCAGTTTCTGAAAGTCCTGGGATTACAGGCATAAGCCACTGCGACTGGCCTGCTAATT
TGTTTTAAGAGAGGCAGAGATGTAGGGAAATAAGGACAGAGACAGATAAGTAACAAAGATAATGAGACTGAGAAACA
GAGTTAGGGACAAAGAGGGAACACATAGAGATAGAGATGGGGAGCCAGTGGCAGAAAGACAGAGGGCAAACCTCAGA
CAGTATACAGAGAGGAAGAGAGAGAGACACAGAGAGAGAGAGAGTCACGTAAGGAGAAGGAGGAGGAGGAGGAATAA
GAGGAGAGAGAGTAGGAAAAGGAAGGAGGAGGGGAGAAAGGAGGGAAAGGAGAGAAACAGAATAAGAGATAGGAAAA
AGAGAGAGTGACATAAAAAGAGAGGAAGAAAGAATGAACAAGACAAATAAGGTATCTTTAGAGGGAGATGAAAAGAA
AGAATGAGAGAGAAAGAGATTGGGGAGAAATCAGATTCAAATAGATGGAGATAGGAAGTTAAGCAAGATGGAAGAAA
GCCAAAAAAAGGAGAGGAAAAGAAGAAAAGCTGTGTCTGACAGGTATAGACAGAGAAAAAGACAGGAGTAGGGCTGC
CAGGGGCAGAAAGAAAGGTATAACCCAAGCCAAAAGGGTACTGCAGCCAAAGAAATTCGAAAGGTGTCCAAACAGAC
GGCCCCAGAGATGGGGAGGGCGTGATGAGAGGGAGATAATAAGCCTCAGGCTGTTGTGAAAAATGTTAGGTCACACA
AAGAGTTACAGAAGAACAGGCCCAGAGACCTGCCTGTTTCTAAGCTCATGTCACCCACCTTCTGGGTATGCCAAAGG
GATGTGGACACTTTTCCAAACACCTCCACATAGACACACTTGTCCAACAACTTGACAGGCATAGGGAATGCCTGAAA
ACTCACACTTGACATGGCCTTTCCAAGGTTTGCAGATTATGAAACACTGAAGTGAAGGGAAAGGCTCCCTTTGTCTC
TGCCTGAGCTTTTTCCAGCACCCTTTGTTCTTATTTTTCTCCCAATCTGTGGTTTAGAATCTACTGGGGGTTCCTTG
CACCTCTGAGAATCAGTGGAAGCCATAGACCCTCCCTGTCTCATACGCATCAGTCCCATTCACAATTTATATACAAT
TGGGCTTTTCCCCCCTTGAGCTCTTGAAGCCTGTGGATCTCAGGCTGAGACTAGAAGACAGCCTAGAGACACAGACA
CAGACACATGGCCAGAAACACATACCCCACACATACCCCAGAAACAAACACAAGGCAGTAACCAAACCTTAAGCCTC
CTTAGCACAAGCCAAGTGCTATTCTAAGAATTTTTACAATTGTCTCCTTTAACCTCACAAGAGCCCTTTGAGGGAGG
TGCCATTCTCCCCATATGAGAAGTGAAGAACACTAAGAATGTTGTCATAAATGTGCTCACACTCACACATGTACAGG
TACACACACACACACACACACACAGAACCAGAAATGGGTCATTATACTCTGTGGGTTTCACCAACCCTTTGGAACTG
TAACAGAAGCTAGAAACTCTCTTATATAAAAATGAACATGGCGCCGGGTGCAGTGGCTCATGCCTGTAATCCCACTT
TGGGAGGCCAAGGCAGGTGGATTATCTGAGGTCAGGAGCTCGAGGCTAGCCTGGCCAATATGATGATACCCCATGTC
TACTAAAAATAGAAGAAATTAGCCAGGCGTGGTGGCAGGTGCCTGTAATCCCAGCTACTTGGTAGGCTGAGGCACAA
GAATCATTTGAACCACCTGGGAGGTGGAGGTTGCAGTGAGCCAAGATGGTGCCACTGTGCTCCAGTCTGGGTGACAA
AGAGAGACTCCATCTCAAAAAAAAAAAAAAAAAAAAAAAAAAAAAAAAAAAGAGAGAGAGAGAAATGAACGTGGCAC
ATCCACTCAAAGATTTGCATCTGGTTTCAGAGCAGCTTCCTAAAAGTCCACCCTGAATTGTAGGTTAAAGGCCAGTC
TTATGCAAATCTGTTGCAGTGGACATTTGTGTCTGGGCTTAGGGACATGGCAGAGCGAAGTGTATGCACCTGCCCTG
TGCCCACACTGGTGACCTTCTGTGTCCACAGGGAAGCGGATTTGTCTTGGTGAAGGCATCGCCCGTGCGGAATTGTT
CCTCTTCTTCACCACCATCCTCCAGAACTTCTCCATGGCCAGCCCCGTGGCCCCAGAAGACATCGATCTGACACCCC
AGGAGTGTGGTGTGGGCAAAATACCCCCAACATACCAGATCCGCTTCCTGCCCCGCTGAAGGGGCTGAGGGAAGGGG
GTCAAAGGATTCCAGGGTCATTCAGTGTCCCCGCCTCTGTAGACAATGGCTCTGACTCCCCGCAACTTCCTGCCTCT
GAGAGACCTGCTACAAGCCAGCTTCCTTCCCCTCCATGGCACCAGTTGTCTGAGGTCACATTGCAAGTGAGTGCAGG
AGTGAGATTATCGAAAATTATAATATACAAAATCATATATATATATATGTTCTTGTTTTTTGAGACAGAGTCTCACA
CTGTTGCCCAGGCTGGAGTGCAGTGGCGTGATCTCGGCTCACTGCAACCTCCACCCCCGGGGATCAAGCAACTCTCC
TGCCTCAGCCTCCCTAGTAGCTGGGATTACAGGCATGCACTACCACGCTTGGCTAATTTTTGTATTTTTAGTAGAGA
TGGGGTTTCACTGTGTAGGCCAGGCTGGTCTCGAACTCCTGAACTCAAGTGATTCACCCACCTTAGCCTCCCAAAGT
GCTGGGATTACAGGCGTGAGTCACCGTGCCCAGCCATGTATATATATAATTTTAAAAATTAAGCTGAAATTCACATA
ACATAAAATTAGCTGTTTTAAAGTGTAAAATTTAGTGGCGTGTGGTTCATTCACAAAGCTGTACAACCACCACCATC
TAGTTCCAAACATTTTCTTTTTTTCTGAGATGGAGTCTCACTCTGTCACCCAGGTTCGAGTTCAGTGGTGCCATCTC
TGTCCACTGCAACCTCCACATCCTGGGTTCAAGTGATTCTCCTGCCTCAGCCTCTGGAGGAGCTGGTATCACAGGCG
TCCCCCACCACGCCTGGCTAAATTTTGTATTTTTAGGTGGTCTTGAACTCCTGATGTCAGGTGATTCTCCTAGCTCC
AAATGTTTTCATTATCTCTCCCCCAACAAAACCCATACCTATCAAGCTGTCACTCCCCATACCCCATTCTCTTTTTC
ATCTCGGCCCCTGTCAATCTGGTTTTTGTCACTATGGACTTACCAATTCTGAATATTTCCCATAAACAGAATCATAC
AATATTTGATTTTTTTTTTTTTTTTGAAACTAAGCCTTGCTCTGTCTCCCAGGCTGGAGTGCTATGGTGCAATTTTT
GTTCACTGCAACCTCTGCCTTCCAAGATCAAGAGATTCTCCAGTCTCAGCTCCCAAGTAGCTGGGATTACAGGCATG
TACTACCATGCCTGGCTAATTTTCTTGTAGTTTTAGTAGGGACATGTTGGCCAGGCTGGTGGTGAGCTCCTGGCCTC
AGGTGATCCACCCACCTCAGTGTTCCAAAGTGCTGATATTACAGGCATAATATGTGATCTTTTGTGTCTGGTTGCTT
TCATGTTGAATGCTATTTTTGAGGTTCATGCCTGTTGTAGACCACAGTCACACACTGCTGTAGTCTTCCCCAGTCCT
CATTCCCAGCTGCCTCTTCCTACTGCTTCCGTCTATCAAAAAGCCCCCTTGGCCCAGGTTCCCTGAGCTGTGGGATT
CTGCACTGGTGCTTTGGATTCCCTGATATGTTCCTTCAAATCTGCTGAGAATTAAATAAACATCTCTAAAGCCTGAC
CTCCCCACGTCAA
SEQ ID NO: 3 (TPMT)
Homo sapiens thiopurine S-methyltransferase (TPMT), RefSeqGene (LRG_874) on
chromosome 6
NCBI Reference Sequence: NG_012137.3
>NG_012137.3:5067-31833 Homo sapiens thiopurine S-methyltransferase (TPMT),
RefSeqGene (LRG_874) on chromosome 6
GTCATTGGTGGCGGAGGCAATGGCCGGCAACCAGCTGTAAGCGAGGTAGGCTCACTCGGGCGCGGAGGGTGCGGGTG
AGAAAGGGAACGATTTGCTAGGAGTGTATGCGCCCGTGCTAGGGCTCCCAGGAATTCTTACAAGCGTAGACAGCCTA
GCAATCAGCCCTGTGAAGTGGGGTTCAGGGCAGAAGCGGAAACTGGGAATAACGAGGTCGGACAGTAAATGACCTGA
ATCCAATGTCCAGGATTTAAAGTGCTTCCAAAGCACTGGTGTGTTTTAATTATTTTTTTTTCTTTTTTCTTTTAGAG
ACAGGGTCTCCCTCTGTCGCCCATGCTAGCGTGCAGTGGCACAATCATAGCTCACTGTAACCTGGAACTCCTGGGCT
CAAGTGATCTTCCCGCCCCAGCCTCCTCGGTAACTGGGACTACAGGCTCGCTGCACCACGCTTGGCTAATTTTTCAA
ATTTTTTTTTATAGAAACGGACTCTCGGTTTTTTCCCCAGCCTGGTGTATTAGTGATTTTTGGGAAAAAATAAGTAC
TGCCAAATAGTGAGTGATCCCTGGTGATGTGGGAAACTGGGGTGCTGTAAATATTCTGTCTTGCTCTGCGGTGGTTA
CACAGGTGTATGTATATGTAAAAAATTCACCGAGTCATACTCTTTTAAGATGTGTGCACCTTAGGAAAGTTTCTTCT
CAATTTTATGAAATTTAAAAACAAAACTATAGCAGAAGCTTTTGAAAAGGTGAGAATGGAGACTAGAACAACTTGAG
GACTTTGTTTGTGGGCAGAAATTTTTGTGAAATTTCCCTTCCTTAATTCTTGTAATGTGCACTTTTTTTGTATTATA
GAAATAAACTTTATTTCTCTAGAAATGATGTATACAAGTGGAGTCCATGCTGAGAAACTGTTAGAACAGCTAAGACG
TTGAGCCCAGGAGTTTGAGACCAGCCTGGGTAACATAGCAAGACCCTGTCTCTACAAAATATTTAAAAATTAGCCAG
GCATGGTGGTGCACCCTTATAGTCCCAGGTACTCAGGAGGTTGAAGTGAGAGGATCGCTTGAGCCCCAGTGTTGGAG
ACGGAAGTGTCATTACACCACTGCACTCCAGCCTGGGGGATAGAGAGAGACCCTGTCTCAAAAACAAACAACTAAGA
CATGATTAAGTTATGTGCATGATTTTGTTAGACAGTTCAAGTTTGTGTGAAAGGAATAGAGTTGTGCTACTCCAGGC
TGCTGTGGAACTCTGATAAAGATTATGCTTCTCTTTTAAGTAGAGAACTGCTTTATGAAGCCTTGAATTTAGGTTCC
AGAGTTTCTGAATGAAAATGAGAAAACTGCAACATTCTTTTGCTTTTCTGTACCCAATATAAATCAGATACTTTCTA
CTGACCTCTCAGAAAACTCAGAGTCACCTCCTGATACCATCAGGGTCTTGCAGAAGCCATTTGTCAACAAATATTTG
CTAAGAAGTGAATTCATGTTCCCAGGTAATGAGAGAAATGCCTCCTCCCTATATCCTAAGCATACTGAGGCCAAATT
TGGCAACAAAAGGGGAAATTTGCCTGAAATACATGCTTTTATGCAATGTTTGCTATTTCACAGATTAATCATTAAAT
TAGAACCACCAATAATAGCATGCTAGTATAATCCAAACTAGTTTCACTAATGATTTAAAGGGAATGTTAGAATAATG
GTGTTATATTGTCCTTAATATTGCAGAGTTGACATTGAAAGGAAAGGCATTTTCCTCATACATTCAGATGGATCTGC
AGTTATGGTCTGTCAGCTGAAGAATGAGAAGTTCATAATTTAGAAAGGAGAACTCTTTCTCATGAATGGTTTCAGAC
TGTAGAGCAGCCATTCTGACTGGCTGAGAAGTGTAGCCGCAGGCCAGAAGCCAGAAACTGACACTTCCAGGGAGGGG
CAAAGGGAACAGGAATTTATGCTGAGGAAGGTGGCCAAATATACATATTCAGTAAGCTGTAGGATGACTCATGAATA
TTTATGAAAGGAGGAAAGTACCCATGAGTAATTGAGCTTCATGGGTACCATGCACAAAAAATGGCGGTGTTACCACA
ATCACAGGATGGAGTTTTTGGCCCTCTTATATCAAAAGGTGAAGCAGAGGACAGAAAAACCCTTACTGTGCATTCTC
AGTAGACTGGCCAGAACCATTCTGTGGTCTGTGATCTCTTATCAGGCACAAAAGGAGGGGCAGCATCAGGGGGTTGG
TTGATATCAGTGGTAGAATCTTTTGAAAGGGCTGGTTTCCCTTAAGTCCTTATAGAACAAAGCCTAATTGTGGTTAG
CAAGAGAGGAGGTATAGAGTTGTATCTGACGCTCTATCTACTCTTGGCCCAGAACTCAGTTTTCAAGGTTACTCTGG
GGTCCCGTTAGCCAAGAAAGTGTGTAGTGAGCCAAGATCGCACCACTGCACTCCAGCCTGGGCAACAAGAGCGAAAC
TCCATCTCAAAAAAAAAAAAAAGAAAGAAAGAAAAGGAAAGAAAGTGTGCCTTCAGTCAGTTGAGAGGCTTTGAATT
TTATTGTTAGTTTACATTGTACATGTCTTTTTTCAGTTTCCTTAGTGTGCATTTCCCATGCAAAAAAAGAAGCTGTA
GAAAATTATTTGAAAATACAAATGTGTGGAGTAGAGATAGGATATTGAACTATGGTTCAGTATCTACTTTAATCTGT
TTTTGCTGTCTCCTGAAAATAACAGAATTTTTTTTTAAGGCATAAAGTACTAGGATAGCCAGGACAGGAGAGACAAA
ATTAGTAAAATTTTGGAAAGGCAAATGGACAAGTGGGAAAGGATTTTGCAACTTCAAGGAAGCTGAATTCTAAACCA
GCAATGAGAAAAGCCATTGAGCAGCCCAGTTTGCAATACAGAATCCCCAAATGCTCAGGATTAGCAGCACCAGGTAC
CTCCATAAAGTGTGAGAGTATGGTTGAAACAAGGAGGATTGCTTGAAATGCTGGTTCAGAACAGGCCAAATCCCCAG
ATCCTTTTCTCAACTTCTTGCAACCAAGTGTGTACATCTCACCACACCAGCAGGCTTTGGGGATTTATTCTCTGGAA
AGGGTAAAACAAAGAGTGTCTGTCTAGACTGAGAAGATATGATACACAGTTGAGCATGGGAGTATACAGGAAACGTG
AGGATTAATTGAATACAGCAAACTGGATGCTGGGACCCTCGCCCACTTCTCTTCTTTTCTTATATGAGTATATGACA
GTGGCTCCAACGACAGAATCCTTAAGACAGGAATTGGGAGATCCATCTATGGAAAGTCTGACTACCACAAGGAAATT
AAAGACATTAGCCAGGCATGAGGGTGTGCAGCTGCAGTCCCAGATACTTTAAAGGCTGAGGCGGGAGGATCACTTGA
GCCCAGAAGTTTGAGGCTGTATTGTGCCACTGCACTACAGCCTGGGTGACAGAGCGAGACCCTGCCTCAAATAAATA
AATAAATAAATAAATAAATAAATAAATAAATAAATAAATCTAGGTTTCCAAATGAAATCCACTCACATCACCCTACA
TTATAAGCCCCACCCACATTCTTTGCCTTCATTCATTTTATACCTATTCTTTTTTTTGTTTTTTTCTTAAGACAAGG
TCTTGATCTGTAGCCCAGGCTGGAGTGCAGTGGCACCATCATAGCTCACTGCAGCCTCGAACTCCTAGGCTCAAGCC
ATCCTCCTGCCTCAGCCTCCTGAGTAGCTAAGATTACAGGCATGCACCACCATGCCTGGCCAATTTTAAAACTGCTT
TTGTAGAGATGGAGTCTCACTATGTTGCCCAAGCTAGTCTCAAACTCCAGGCGTCAAGCCATCCTCCCACTTTGGTC
GCCCAAAGCACTGGGTGATTGATAGCAAAAAAAAAAAAAAAAAGAGAGAAGAAGTTAAAAAAATGAGAATTAAGGTA
AATCTTTCAGAAAATAGTACAAAAACATGAAGATATAGAAAAATAGAAAAAAATGAGAAATTTACCATACCGGGTCA
GAAGATTCTAGAGACAAATAATAGGGGTCCCAGAAGGAGAAATAAAAAAAGCAGAGGGATGGCCAGGCTCAGTGGCC
CACGCCTGGAATCCCAGCACTTTGGGAAGCCGAGGCTGGTGAATCACATGAGGCCAGGAGTTCAAGACCAGCCTGGC
CAACATGGTCAAATCTCATCTCTATTAAAAACACAAAAATTAGCTGGACCTGGTAGTGCATGCCTGTAATCCCAGCT
ACTCAGGAGGCTGAGGTGGGCGTGATTCTTCACTAAACCTTTAGGGTGCCCAACCCCCTATGGCCCCCACACTTCTA
ACCAAGAATTTGATACCCAGCAGAGCTATGCATCAAGGATGAGGAATAGTCTAACCGTGTTTTATACATGCAAAATG
GAAAAACATTCTTTTTCTTCCTTGTGCTCTTTCAGGAAGCTCTGGAGGTTAGGCTTCACCAATATAAGCGTGGTCAC
TAAAAAATAACAACAAAAAAAAGAGGAAGACATGAAATAAAGCTGGAGATTCAGACAAGAAGGAAATCTCCAGAATG
ATGATGAAGAGCGATCCCAGAAAGCTAGCTGTCTACCAAGATTAGAGAATAATCAGGGCAGATTCCAGGAGAGAATT
CTCCAAGATGATATTGATAGTATAGCTGATGACTGGAGAGACTGACTGTGTACTGATAGGAAATTGGGACAATTGGC
AGAATTTAGAGTTGAATTAGGAGTAAGTACAATAATGCCTACGTGATGAAGCCTACATAAAAACCCAAGAGGATGGG
GTTTGGAGAGCCTCCTAATAGCTCAACAGGTGAAGGTCCTGTAGCTAACACATCTCTTCAAGTATATTCTTCGCAGT
ATCCTTTATAATAAATGTGCAAAGATAACTAAGTATTTCTCTGAGGTTTGTGAGTTGCTCTAGCAAATTAAGCAAAC
CCAAAGTGGAGGGTGTGGGAACCCCAACTTGAAGCCAGTGGAGGCCTGGACTTGCAACTGGTGTCTAAGTGAGGAGG
GAAATCTTAGGGACTGAGCCCCCAACATATAGAATCTGACACTATCTCCAGGTAGGTAATGTCAGAATTAAATCAGA
AGATACCCAACTGGTGTCCAATATTTGGTGTGCTGGGGGAAGAACCCCCACATTTGGTCACAGAAATCTTGTGTGTT
GATGATTGGGGTGTGAGAGCAGAGGAAACACTAATATTAAGATAGAATTCAGTTTATTTAATGATCTCTTGTAATGT
GTATTAAGGGGTATTATTCTACCACCAGACGCACTGAAAGTAATTTTTTGTTATCACTTCTTATTGGATGTTGAAAT
GGCAAGGTGCAGTGACTCACACTTGTAATCCCAGTGCTTTGCGAGGCCAAGACAGAAGGATCCCTTGAGCCCAGGCG
TTCTTTGTTGTCTGGACAACAAAATGAGAACCATCTCTATTAAAAAATATATATATACAAAAATTAACCAGGTGTGG
TGGTGTGTACCTGAAGTCCCAGCTACTTGGGAGGCTGAAATGGGAGGATCGCTTGAGCCCAGGAGGTTGAAGCTTGC
AGTAAGCCAGGGTCTCCAGCCTGGGTGACAGAGCAAGACCTTGTCTCTGAAAAAAAAAAAAACAAGGAAAGAAAGAT
TAGCTGGGCATGATGGTGCACACCTGCAGTCCCAGCTACTTGGGAGGCTGAGGCAGCAGAATTGCTTGAACCTGGGA
GGCAGAGGTTGCAGTGAGCCAAGATCACACTACTGTACCCCAGGCTGGGAGACAGAGTGAGACTCCATCTCAAAAAT
AAAACCAGAAATAAAAAAAGAAAGAAATATTTTTAAAAAGTCATACTGCTAAGAATAATAGGTTTTCATTTAGTTCA
TCAATAGAATTCCAATGACCTTAAATGACAACATTGCAAATATTTTCCACGTAGGCACGGAAGACATATGCTTGTGA
GACAAAGGTGTCTCTGAAACTATGGATGGTACAAGAACTTCACTTGACATTGAAGAGTACTCGGATACTGAGGTACA
GAAAAACCAAGTACTAACTCTGGAAGAATGGCAAGACAAGTGGGTGAACGGCAAGACTGCTTTTCATCAGGAACAAG
GACATCAGTAAGAAATATTTGGTATACAATAGAGAAATGTTCTATCAAAAAGTGACTTTGAGATAGAAATAATAAAA
GTACACATTATTTGACTAACTTTTAGGATGCACATTTAATTCTTCACATTTTTGTGTCTCCCGAGTCACAGTGCATC
TGTGGCATGATGTAGTTTAATTGGCAGAGTCTTTTCTTCCCACAGTGTGTAAATAATGGTGTGGCTTACAAATGATG
ACATCTTAGATTTATAAAATATGTTCTTTGATCCCTACGGCACCTATGTATTGGCCCTGAATATTTATACCTACAAC
AGGTGCTCAAGCAATGTTTATGCTTACAATTCTTCATACTGAAAATCAGTGGTGTCTGACTTTGCTTTCCAATAGGA
TGTGTTCAGATGTTAAAGAATTATCTCTATGGTGGGAGAAAAGAAGTTGCGAGAAATTATAAAGTGAGTTAGGATGT
TGTGCAATGTAGTAGTAGTCTTCATAGCAGCAATAAATCATGGGACCAGTGCTGAGTAAAGTGGTTGTTAGAGACAT
TCCTTGTTCTGGGCAGCCACGCCCATCTCCCCAGGAGATGACATCATCATCATCATCATCATCATACCAGAAACACT
GGGTTATTTCTGTCATGTGGATGGCCTTAGAAGAGCCACATCTCCACAGAGGGAATTACAAGAAACTACAGGAGTTA
CACTTCTCAGGTTTACTTCCGAGGCTTGAGTACACGTTTAGAGAACGTACCATGAAATTAATGTTGAAAAATCCATG
GCTCCAGAGGCTCCATCACCCCCAAAATAGTACATATTTAGAGAATTAATAAAGAATTTTCAAAACATCCCCAAGAA
AAAAAAATTATTTTTAATTACTAATCAGGAAAGCCCTGGGTGTAAGTCAGATTTACCACTGACTGGGTGTGTGTCTG
AGCAAGTTACCTGTTTCTTCATATGTAAGCTGGAGATTATAATAATTAATAGTAACTGCTTATTAAGGTTGTTGGGA
ATATTAAGTGAGATAATGAATGAAAAGTGTTCACCTACCATACAATTGTCCTAAAACCTTTTTTTTTTTCCTCTTCA
GGCTATTAAAGAAGCATTTAGATACTTTCCTTAAAGGCAAGAGTGGACTGAGGGTATTTTTTCCTCTTTGCGGAAAA
GCGGTTGAGATGAAATGGTATGAGCAGATAAACATTAACAGAATTATCTTGCCTTAATGATGAATTCTTTGGGTGAT
TTAACAGGATGTGAGTTTTAAAACTCCATTTTCAGGAAATACACAGAAATTCCTTATTTTTCTATTAGTGATGGGTA
TATAATTGGAAATAATATTCTCAAACAGTAAGAAACAACAGAAACAGGTATGAAGTCTTTCTGGATTGAGTTTTGAA
ATTAAAAAATCAGTTTGGAGCCAATGGGGGGAGAAAAAACAGCCTTCCCTTTTACATTTCCTGGATCCTTGTATGTG
GTTCAGTTTTTGTAGGTGGTTTAGGAATTTAGCTAAGTTAATTTTTAGATATTTGAAATGGTGGTGGACAGAGAAAT
TCAAAATGAATTACAGCTTTTTGGCAGGACAATGTTCATAGTCCACAGTTCAGCTCAACCTTCCCCTCCCACCAGGG
AACACAGGAGTTTCTGTTATCGTGAATCATTGTTATAAAACCAGTGATTAAGAAAGTATTTCTTGTGAGTAATTCTC
TACAAAGAGAATTCACTTTAACAAGCCACTTTTACTATGAGTTACCCTAAAGTCACCTCGACATCATTCTCTATACT
GAACTCTCTTGTAATGATAATATACAGATACAATCATACCTGCCAAGATATGCATTTATTTATAAGCTTGAATGTTG
AGAACTTTGACCACTGAGCAGGAAAGAAAAAAGAATGTATGAAAAGGTTAGTAAATGCGCCAGGTGTGGTGGCCTCC
GCCTGTAATCCCAGCACTTTGGGAGGCCAAGACAGAAGGATCTCTTGAGCCCAGGAATTTGAGACCAGTCTGGACAA
CATAGACCCTGCCTCAAAAAATAAATTTAAAATAAAATATTAATAAATGTAAAATATAATAACCTAAAAAATGGTCT
ATTCTGAATATAAATATCGGTGACTAACGCAGAGTATGCATGCATTTTTTGGGAGTTGATTTTCAAGTAGAGATGAT
AGAATTTTTGCAGCCAGCAACCAATCAACTGTAGCTGAGAGCCTTTGTTAGAGGGCTGCTATGACTTTAAGATTCAA
GTGTGGTCATGAAATTGAGAATATTTAAACTATATTATGACATATATTTTAACCAATTCATTGAGCCAGAAGAGATA
GTTACTTTCAAAATTACCCTCAAAAAAAATTAACTCTATAAACAGATTGTCATGTGATGTCACCATAAATGGTAACA
ATGTAGTACAAACAGGTTCTGAGGCAACATTAGGAAAATGGTATGAAATAGCCAATTAAATGTGATTGTTGAATATT
TGGGGTCTAAAGCCATTTGTAATAAAGACATTACAAAAAATATCAGAACTGGCCAGGTGCGGTGGCTCACACCTTTA
ATTAGGTGAGCGGATCACTTGAGGTCAGGAGTTCGAGACCAGCCTGGCCAACATGGTGAAAACCCATCTCTACTAAA
AATACAAAAATTAGCCAGGCATGGCAGCGTACGCTTGTAATCCCAACTACCTGAGAAGCTGAAGCAGGAGAATTGCT
TGAATCCAGGAGGCGGAGGTTGCAATGAGCCCATGCACTCCAGCCTAGGTGACAGAGTGAGACTCTGTCTCCAAAAA
ATATATATATATGTATATATACGTAAATACAGTTATTTTTATGTATATATATATATGAACTGAGCTACTGTAATTAC
ATGTAAGAAGTTAAGAAGTTATGATAGTAGATGATTTTTCATTTATGTAACTGATCTATGTATTGAGGTCTATACAG
ACATGAGATGTGAATAGAAAAACTGACCATGAGCTAAGGCCAAAAAGCATTAAAACAAAATGTTTAAGATATTTAGG
TTTAGGTTTTTGGTTTTTTGAGACAGTCCCACTCTGTCACCCAGGGTGGAGTGCAGTGGCATGATCATAGCTCACTG
CAACCTTGAACTCCTGGGCTCAAGAGATCCTCCCTCCCAACATGCTGGGATAACAGGCATAAGCCACCACACTTGGT
CTTATTTTGTTTTTATTACAGGTTGTAGTAGGCTATGCTTCATTTTTCCATCTGTTGAATGGGAAATAAAAACACAT
ACAGCCAATTTGAATAATGTTTTTGTTTACATTTTATAACTTAAAAAATGTAGGGAGAATTTTTAAACTCCCTGTAT
GTTTACAGATATCCTAAGAAATACGAAAGATGAAAGACAAGTTATATGTTTCATTTTACAACTAAACAGTTCATGCT
CTGCCCACATTGAAAGTACGTACTCTTTTGTAGATAAAAGGTACAGTCAGTCCTGCTATACTTGTTTCAAAACTGAA
TTCTAACTCAATTGATATATTAGGGAAAAATTTGAGCATGAAATAAATTTCACATTTGCTTGTGTGTGATTTCATCT
ATAAGAAGCCTTAGGTAAAAGCAGAAAACTGCACCCAGTTGAACTAAACCAGGTATGAATAGATGGAATGCACCAAC
ATCCCCCAGCTACCTTAGTGAGCATTAGGTCTTTTTCACCGTAAAGTGCCATATTGTAGTATTTATCTATTTCTCAA
CCATTTAACATGTATAAAACTGTTATTATTAGGTTCCTGTTTTTGTTTTTTAATGTGGCACTGACCAAGTTTTTAAA
TGCTGTGCCCTCACTTTCCCCACCAGCCTGGGGATTTTTAGTGCGTGATTTAGCATAGTGCAGTGATTTTAGGAAGG
CACTTGTTACATTATAGCAGAACTATGTTTTTATTTCACTTGACATAAAATCATAACTGTGCCTAGATATTTGTACC
ACTGGTACTGTTTTCTCTTGAGTCCAAGATCCTGAGACTGAATTCTGTTCATTATAAAACTTACCAGGACTGTAATC
CCAGCACTTTGGGAGGCTGAGGCAGGCAGATCATTTGAGGTCAGGAGTTCGAGACCAGCCTGGCCAACACGGTGAAA
CCCCGTCTCTACTAAAAATACAAAAATTAGCCGGGTATGGTGGGGCACACCTGTAATCCCAGCTACTCTGGAGGCTG
AGGCAGGAGAATTGGTTGAACTCGGGAGGTGGAGGTTGCAGTGAGCTGAGATTGTGCCACTGTACTCCAGCCTGGCT
GACAGAGTGAGATTCTGTCTCAAAAAAAAAATTTTTTTTGAGGAAAAAATTTTCCTCTTTTCCTCAAAATTACCAGG
AAAAGCCCGGGTGTGGTGGCTCACGCCTGTAATCCCAGCACTTTGGGAGGCTGAGGCAGGTGGATCACCTGAGTTCG
GGAGCTCGAGACCAGCCTGGCCAACATGGTGAAACCCCGTCTCTACTAAAAATACAAAAATTAGCCAGGCATGGTGA
CAGGCACCTGTAATCCCAGCTACTCAGGAAGCTGAGACAGGAGAATCGCTTGAACCCAGGAGGTGGAGATTGCAGTG
AGCCGAGATTGTGCCATTGCACTCCATCCAGCCTGGGCAACAAAGTGAGACTCCGTCTCAAAAATAAATAAATAAAT
AAATAAAATTACCAGGACAATGCTATTTGTATATGATAAAATATACAAATTTTTGGATAGTGTTTATTTTAAGCAAA
TGGAAACTACAAGATTAGTATACAAATGAGTGCTAATGTTCTAGACCTGTTCACTTTAGTACAGTAGCTACTAGCCA
CATGTGGCTATTTAAATGTAAACTAAATAAAATGTAAAATTCAGTTCCTCAATCACGAGGAACCAATGTGGCTAATG
CCTATTTTATTGGACAGCGACAGATATAGACATTTTCATCAATGCAGAAAATTTTAATGGGCAGTGCTGATTTAGAG
AAATTGAAAAGCATTTCCTCTAGTCAAATCAATTTGTATTAAATCAGTATTTTGTTATATATCTATAATTACATTCC
AACTGTTTCATACATAAAAAAAGATATATATAATTTTCCAAATTTTTATTGTTTCCTGAATTCATATAAGTCAGTTT
TTCAGAATTTTTATAAGGTTTGAAAATAATATAGATCTGCTTTCCTGCATGTTCTTTGAAACCCTATGAACCTGAAT
TCATATAAATTCCTCTAAATTAAAGAAAATATATGCTTACTCTAATATAACCCTCTATTTAGTCATTTGAAAACATA
ATTTAAGTGTAAATGTATGATTTTATGCAGGTTTGCAGACCGGGGACACAGTGTAGTTGGTGTGGAAATCAGTGAAC
TTGGGATACAAGAATTTTTTACAGAGCAGAATCTTTCTTACTCAGAAGAACCAATCACCGAAATTCCTGGAACCAAA
GTATTTAAGGTTTGTTTTGATTTGGGTAAATAATTGTATCCATATCCCCACAAAAGTTTTTCTCAGTGTGAGTATTA
TGAGGATACCATTCATGTGTCCGATGGTTCCTATTTAGCACGCAGATTCACTGTAGATACTATATAGTATAAGAAGC
AAGGGCTTAAAAATATAGGTGATAGCTACCTAAATAGGTATAGACATATGTATATAAAAGCTGAGGTCAAAGCCTCT
CTGTACTCAAGCTTTTAGGCTTGTTTTATTTTTATTAACACGCATTTTCTGAGAACCCATCATGTGCCAGACCCTGC
CTAAGACATTGAAGAGATAAAGATAACACAGCACACCCCCCTCACTCCCACCCCTAAAGAATCTCTTAGTTTAGGAG
AGAAGAGAAACAGGGACAAAGCTATTTGTAATGCATGGAGCTAAGTGTAAAGACACAGGGTATTAAGGGAAGAGATG
GGAGTTACCTGCCCAACCTGGCGGTGCTTCCTGAAGCATGGTGACAGATAGAGCTGGAATCAGGCAGGGCCTGGGTC
CATGGTCTTGGACACCTCGGGAAGATACTACTTAAATCACCCATGAGGCCTCATAGGAAGTGATTTGAAGGGAAGTA
GCCTCCTGGCAGAGAGACAGGAGGCTATGGCAGTGGTCCAGGAAAGACATCATGAATCCCTGAGCAAGGAGAGTGAT
GGGGCATAGAGAGTGGTTAGGATGGATTAAAGCAACATTTACGATAGACCCGCAGGATTCTGTGACCGAATGAGGAC
CAAAGGAGCGATGAGTTCACATTTCTGGCTCAGATGACTGGCTGGATGGTCAAGAATAAATGAGAAGGGCAGAAAGA
ATGAATCTTTTTCTAGAGATGATGAGTTTAAGGGACCTGTGGAGTGGTGAAGGTTTTATGTCTGAAGCATGGAGTGA
GGTTTGGGCTCAAAATGATAGGTTTGGGAGTGGTCTTTATGCTGTGAGCAGAATGAGCCAGTGTAAATAAACAAACA
CTACCCAAGTGGGAACAAGCAGAGAGAATCTGGCAGAGACTCAAAGGCAGGCAGAGGAGTGGGGAAGCTTAAAAGTG
GACAAAAGTAAAAGCTCCCGGCATGTGCTGTTGCGAGGCTGTTGGCACAGGGAAGCTGGAGGTGGGCAACTAGGAAC
GGGGCATCCTATGTGATTGGTTTGGGGAGCATGTTTGCCTTTCTCTGGCTGATCCTAAATTGGAAGAAGTGTGGTAG
TAAAAATCAGGGAAGCTGGCAGTCATTGACCAAGTCACTGCAGAGGTTGTGAAGTGGCTACCTTGTCTGGGGTAAAT
TCCCCAGGTTCGTCGTCTTGTGCCAGGAAAATTTAGGACAGAGACACACATGAGGAGTTCAGGAGTGGAGGTTTAAT
AGGCAAAAAAAAAAGAGAAAGAGAAAATAAAACAGCTCTCTCTTTAGTGAGAGAGAGGGGACTTCCGAGAGGAAAAA
ACCTGCCAGGTGTAGAAGCGCCGGATTTTATAGTGCAGCCTGAGGAGTCAGTGTCTGATTTACATAGGGCTCACAGA
TTGGTTTGATCAAGTGTGATGTTTACATAACGTGCTGGGAAGGCTGGTCGCCCCACCCTAATCTTATTATGCAAATG
AACTCTTCCCTTCGCTGGCACCATGTTGTCTGCTTCTTACTCTACAGGTGGCTGACAGAGAAGGGAAGATAGAGCCA
CCATTTTGAACATGATTGGCACAAACTGCCGGCATCTATGTCTGCAGCTCGATTTTATAGGCTGCTCTTTGTTAGAA
AGGAAAAATGATTTGAGGCTGCTTTTCATTAAGAGGAAAACCTTCCGTATCCTCCCTATCTGCCTTAGTAATTTCTT
CTTAACTCCTGAATCAGTTGTGGGGTCAGAGTTGTATTGTCATATAGGATCTATTGTCCATCTGTATATTCAGTGTC
TCACAAAGTACTCTTTTCTAAATATTGAAATTAATTGCTCAGCTGGGCATGGTGGCTCATGCCTGTAATCCCAGCAC
TTTGGGTGGCCAAGGTGGGTGGATCACTTGAGGTCAGGAGTTCAGGACCAGCATGGCCAACATGGCGAAACCCCATC
TCTACTAAAAATGCAAAAATTAGCTGGCTGTGGTGGTGCATACCTATAATCCTAGCTACTCTGGAGGCTGAGGCAGG
AGAATCGCTTGAACCTGGGAGGTGGAGGTTGCAGCGAGCCAAGATCGCACCACTGCACTCCAGCCTGGGCAAGAGAG
TAAGACTCTGTCTCAAAAAAAAAAAAAAAAAATTGTTGCTCAGATCAGTAGGAAGCTTGATGGTATTTTTTATTTCA
CATCTTCCTCCCACCTCATTCTCAAAGCATTAAAGAATCCAAGGAGTTTACTCAGTCCAAAAAGGGCTAGTCCTGCT
TCCAGGCCCCTCTTGGAGCAGCAGTTCCCCGCCCAGGCTGCACATTTGAAATCATCTCTGGATCTTATAAAAATTCC
CAATCCAAAGGTCTTACCCCAGGCCAATTATATCAGAATCTATAGGGGTAGGGCCCTGGCATCAGTACTGTTTAAAG
CTCCCCTTGATTCCAATCTGCAGGCAAAGTTGAGATCCAGCTGTTCTCCTGCCTCCAGGCCCACCCATCTCTGGGCT
GACCCAGTGATCCCAGGCTGGTTGTCAAAGACCCTTCCTCCTCTACTTGTAAACCTGTGTGGGGACCTCATTTCAGA
ATAAAATCTAGCAGTCTTGTGTGCTGACACACCTTTCCTACACTGCCCTTCACCCCAGCTCCCAGGATCCTAAAGTC
TATGTTATATTGCCCCCTCTTGGAGTGTGCCCCCAGTCCACACCCTAGAGTGTCACCCTTTCAAAAGTCACCTCTTT
TTTTGTTTTATTCTCTTGATTTTTGTTGTTGTTGTTTATTTTTTAGGATTATTTTGCTCCAAGTGTTTGTTTTTGAG
ACAGGGTCTTACTCTCACACAGGCTGGAGGGCAGTGGCACAATCACAGCTCACTGCAGCCTTGACCTCCCAGGCTCA
AGTGACCCTCGCATGTCAGCCTCCCAGGTAGCTGGAACTACAGGTGTGTGCCACCACACCCATCTAATTTTTTCTGT
AGAGTTGGAGTTTTGCCATGTTGCCCAGGCTGGTCTCATACTCCTGGGCTCAAGCGATCTGCCTGCTTCAGCCTCCC
AAAGTGCTGGAATTACAGGTGTAAGCTGCCACACCTGGCCAAAAGTCACCTTTTGTTTAGTCTCCCTGATGCTCCCA
GGCAGGCCCCTGCTCTGCCTTCTGTGTTCACATAGTTCGCAGGCACAGAACCACAACAGAGCAGGCCATTCTGGATT
GTAATGTTCTCTGTGCCCACGCTTCTCTGCTCTAGTCTGTCCTCACTGTGGTCAGAGACTGTGTCGAATTCAAATCT
ACTGTCAAGAACCCAGGATAGATGTCTTGTCTATTAGGTACTCAGCAAATAAATGCTCATTGGCTGAATGAATGAGC
AAAAATGGAAGAATCAGCACAATTGCACATTTCTGGAATAACTTAAAATACCTGACTTTTCAGTACCACCCTGCCTG
ATAATTGGTTGACCTGCAGATTTATCTTTAGCAGAGTAAAAATATCACTCTGCTCGAGGAAACATTGTTAGAATTTT
ATAGCAAGCTCTGAAGTGAGTAACAGCCAACTGATCTTCAAAGTTGTCCTCTGTGATATTCCTCTGAGTTGGCCCAA
AAGAACCTCGCACAGGTTTTAAAAGAAAAAAATAAGGTGCCAATAAAGTGCAGTAAAATTATTTACTTTAATTATGT
TTAATTAACACATTCTTTCCCTAGAACTTTTGCTTTGCTTGGCCCTCTTTCCTTGACTATTCAAGTACTTACTAAGT
AAAAAAAAAAAATTTTTTTTTCATTATTTCATTACAGAGTTCTTCGGGGAACATTTCATTGTACTGTTGCAGTATTT
TTGATCTTCCCAGGTAGGTTGAATACTACATCTGCACTTTAAAAAATTTGAATGCTTGCCAGGCAGTGCAGGCATGG
GAGTGGAGGTGTCTTCCTCACTCTCTTCCTCCTGTGTAACATCCACAAAGCATTTTTTTGAATGTCTGTTCTGCAGA
TATTTTTATTACACACTCGTCTGCACACTTTAATGTGTTTTGTCTTTGGTTAGCTCCCAAACTATGGGAAACTGAGG
CAGCTAGGGAAAAAGAAAGGTGAGTAAGACAGTGTCTTCTACCTTGCACCTGGGCCTGTAATAGAAATGAATTTCAA
GTAGCCAAGGGAGATAAGAGCTCATCTCCTGAAAGTCCCTGATACCTGAGCCAGAGGCTGGGGGCAGAGTTGTTGCA
CACTGTCCTTTGTTCCTTCTTCATGTCCCCAAATCATAACAGAGTGGGGAGGCTGCTGCCACAGGCTCCTAAAACCA
TGAGGGGATGGACAGCTCTCCACACCCAGGTCCACACATTCCTCTAGGAGGAAACGCAGACGTGAGATCCTAATACC
TTGACGATTGTTGAAGTACCAGCATGCACCATGGGGGACGCTGCTCATCTTCTTAAAGATTTGATTTTTCTCCCATA
AAATGTTTTTTCTCTTTCTGGTAGGACAAATATTGGCAAATTTGACATGATTTGGGATAGAGGAGCATTAGTTGCCA
TCAATCCAGGTGATCGCAAATGGTAAGTAATTTTTCTTTTTTTGTTTAGCTGTCTTAATTTTTTAGTATACTATACT
TTTTCTGGGTTCTAGAAAATCAGCTTAGACTTCTATGAGTTTGAAATAGGTTATTATGTTTGGAATTTATAAAAACC
TAAATCCAATACTAGCTTTGTCTAAAAAGTATAGGATTTGACTACAGAGACCTGGGTGTAAGGCTATAAGGCTTGTG
GCTCAATCACTTTCAAGCTGTGTGGCCTTGGTCCAAGTATTCAACTTCTCTAAGCTTTGGTTTACTCCTGCAAAATG
GGAATATTTCTGTAATACTAACACAATCATCACCACCTCCACTAATATTACCAGGTAATACTTACTGGTCACTTGCC
TATTCCAGGTATTGTTCAAAATACTTTATGTGGGCTGGGTATGGTGGATCATACATGTAATCCCAGCACTGTGGGAG
GCCAAAGCAGGAGGATTACTTGAGCCCAGGAGTTTGAGACCAGTCTGGGCAACAAAGCAAGACGCCACCTCTACAAA
ATATTTTTAAAATTATCCGACCGTGGTGGTATGTGCTTGTAGTCCCAGCTACTTGGGAGGCTGAGGCAGGAGGGTGA
GCCCAGAAGTTCAAAGCTGCAGTGAGCTATGATCGTACCACTGCACTTCAACCTGAATGACAGAGCAAGACCTTGTC
TGTAAAATATTTAAAAAAAAAAAAAAACAAAAAAATCAAAATATTTCATGTGGTTTAACATTTAATTCTGTAAGGTA
TAAGCTACTATTCCATTATACAGATGAGGAAACTGAGGTCAAAGAGATTAAGTTACTTGTCCAAAGTTAAGCAGCTG
GTATGTGACAGAGTTGAGATTCAAAACCAGAGTGTTTGGCTTTGAAGTCCATACTTGTGGCCGGGTGTGGTGGCTCA
CGCCTGTAATCCTAGCACTTTGGGAGGCCAAGGTGGGCGGATCGCCTGAGGTCAGGAGTTCGAGACCAGCCTGGCCA
ACATGGTGAAACCCCATCTCTACTAAAAATACAAAAATCAGCCCAATGTGGTGGCCTGTAATCCCAGCTACTCAGGA
GGCTGTGGCAGGAGAATCACTTGAACCCAGGAGGCAGAGGTTGCAGTGAGCCAAGATGGCGCCATTGCACTCCAGCC
TGGACGACAAGAGCGACCCTCCATTTCAAAAAAATGAAATAAAATAAAGTCCACACTCATGATCCCTTTGTTAGACT
ACCTCAAAGGATTTTTGTGGGAATTGAAAGAAATGAAATATGTAGGAAATACCTTGTCATCTCTAAAGAACTGTATA
AATGAGAGCTGTTATTATTGAAGCATTGTTATTGATGTTTTTGATGACCATTCTTATTATACCGAGTCTTGTTAGAA
AATAAAATTAAAATATGAGTGAGGAAGCATACTGAGTAAAATGTGACCACATCTGTATACTCTTTCAATTAAAATAA
TGTCATTTATGTGCTTACTTGGATATAGCATGGAAATATTGAATTACTTAGTTGTATGGAGCAGACTCATCACTTGG
CCAAAAAGGAGGCTGGGCGCAGTGGCTCACGCCTGTAATCCCAGCACTTTAGGAGGCTGAAGTGGGTGGATCATGAG
GTCAGGAGTTCGAGACCAGCCTGGCCAACACAGTGAAACCCTATCTCTATAAAAATACAAAAATTAGCTGGGCTTGG
TGGCGCACACCTGTAGCCCCAGCTACTTGGGAGGCTGAGGCAGGAGAATTGCTTGAACCCGGCAGGTGGAGGTTGCA
GTGAGCCGAGATTGTGCCACGGCACTCCAGCCTGGGCAACGGAGTGAGATTTCATCTAAAAAAACAAACAAACAACC
AAAAAAAAAACAGGTTAGGCTCCACATCAGTGAAATAAGATTTTTATTTTTAAAAATTGTTTCATCAGTAAGGCTTA
CTGCCAAACCTAATCTTTTTAAATTAGACCATGCCGCATCTTAATTTTCATGCTCCTGTTTCCCTCTTTTTCTCACT
GCTCCTCCTTTATCTCTTTTCCAGAACTCCCATCCTCCTTGCATGCCTAAAAGTCGTGATTCCCCAAGGGACCACCA
TCCTCAGCCTTATGCTCTCACCCAAAAATTGCCAATATTTGTCCTACCAGAAAGAAAAAAAAATTTTATGAGAGAAA
AATCAAATCTTTTTTTTCGAGACAGAGTTTCGCTCTTGTTGCCCAGGCTGGAGTGCAATGGCACTATCTCGGCTCAC
CGCAACCTCTGCCTGCCAGGTTCAAGCGAATCTCCTGCCTCAGCCTCCCAGGTAGCTGGGATTATAGGCATGCTCCA
CCACACCCGGCTAATTTTTTTGTATTTTTAGTAGAGACGGGGTTTCTCCATGTTGGTCAGGCTGGTCTCGAACTCCG
GACCCCAGCTGATCCACCCGCCTCGGCCACCCGGTGCTGGGATTAGAGGTGTAAGCCACCACGCCTGGCTGAAAAAT
CAAATCTTTAAAGATCAATTCTGTTACTTTCATTCAGCTATTCAACAAATATTTACTAAGTTCCTGTGATGTTCCAA
ATAGATAGTATGCCAGAGGCGGGGCAAGTAACTGAACAGATTATACATGGTATTCGCTCTGACAGTCTTTACATTTC
CAGCTCTGTTCTTTCTCCCAAACATCCACATCACATGTCCAGTGTCTGCTTTGCACTTCCCATGTGACATCAGTGTC
CTTTAACAACTCAAAATATCACCGAGACCTCTGTCTCCGTGAGACACATTTGTATATGAAACCCCATCTGCTAATGT
CTAAATTTGTAGGTGTTTCCCACTCCCTGAAGATGATCATCCATTCCTTAGAGGTTAGTCCTTCTACAGGCTCTGGT
TGGCATGGTAAAATCCACCAAGCAGTGGGAAGCAAACTAAAAGTCACCACGTGCAGACCAAGAGCGGACCCAGCACT
TTGGGAGGCTGAGGTGGGCAGATCACCTGAGGTCAGTTATTTCCCCAGTGTCTGATATAATATATATTTAGCACCTA
GTAAGAGCTTAATAAATGTTGTTTAAATAAATGAATGGAAGAAGTGAACTGCACTCTGAGCAAGGGCGATATTAGTT
TACTATGTACTGGTAGTATCTTAGGGTTTTTTTTTGAGATGGAGTTCCACTCTTGTTGCCCAGGCTGGAGTGCAATG
GCATGATCTCGGCTCACTGCAACCCCTGCCTTCTGGGTTCAAGTGATTCTCCTGCCTCAGCCTCCAGAGTAGCTGGG
ATTACAGTAGCGCCACCACACCCAGCTAATTTTGTATTTTTACTAGAGACGGGGTTTCTCCATGTTGGTCAGGCTGG
TCTCGAACTCCCGACCTCAGGTGATCTGCCCACCTCGGCCTCCCAAAGTGCTGGGATTACAGATGTAAGTCACCGTG
CCCAGCCTTATGTTAGTATTTTATATATGTGCTGGTACTTAGTATCTTAGTTCTTTATCTACATGCTGGTACTCAGT
ACTTACCATGTTAGCACATTATATTGGTGCTTTCGTTAGGACTGGGTGTCTTCTCCTTAGATTGTACATTGTCAAGT
ACTGATGTATTTTCTGCTGTGACTCTCGAGTTCTTGCCTAATGTAAACCAGTAGGGCAGACCTCATTTTTCTGGACT
TTTTGAGACTGGTTGAGAGAGAAAAACTTCACATTCTAAGAGGAATGAAGTCTTTCAGTCCTAGGAAACCCTACCAA
ACCAGTCTGACATCCCCCTCATGGGGACAGCAAGTTTCTTCTGAAAAATGAGAATCAGAAAGTAACAGTTTCTGTTC
AAAAGTTTGCTTTGATGTGGTTCTTTCACCTACAAGGAAGAGTGATCCACTGGTGAATTCTCACAGTTTGTGAGGTG
GTTATTAGTCTTATCCTCATGTTACAGGTGAGGAAACTGAGGTACAGAAAGGTTAAGAATTTGTCAAGCTTACATAG
CCAGTCAGTAGAGGAGCTGGGGTTTGAGCCTGGGCATCTCATAGAGTCTGCACTTGCCTCCCCAACTTCTGGCAGAC
CTCTGGACATAGATCACAGTCTAGCCAGGCTCCATAGAAACTGGAGTGCCAAGAGCCCAGGCTCCTTCCTCAGTGTG
GGGAAGGGTGTCCATCTTTGTCCTTGGCCTGTCTCTCATGGCCTCTCTACCACCCTGCATGCGTCTCCTGTCCTCTC
CTTATCCCTCAGCTTCCTCCATTTTTATTCCCACATAGCTGACTTGCCTTCAACGGTCAGCCTCCTTGCTCCAACCA
CCATACAATACAAAAGCTCCAACTTTCAGTAGGACCACAGCTAATTAGCAATTCCTCTTTGGTCTCTTAATTCAGTT
TCCAAGTCAGTCATCTGATTGGTCAACTCATCGTCTGTACCTGGTCCAGCCCTGGCTTCTGCTCAGTCTATTGATGG
GTCCTGTTAGCATCAGCTTCCCACTCTGAGCCAATCAGACCTGGCTCCCTGAGGCACCTACTCAAAGGACAGTTCCA
TTGCACTCATGGTTTATGCCACACTTGCAGAGCTTTAATTTCATGCCACCTTTTTTTGGCCTGCTTGTTACTCTCAT
TTCTAACTAAATAGAGGAAAAAAATTGTGTTTTCTCTTACATAAGGCCCCTGGAGGGGTCCCAGTCACCCAGGATAT
TTGTTAAATTGCAGCATCCCAGGCCCCATGGCAAACTAACTGCATCGGTCTGTGGGGATGGAGCTCAGGCATCTTTT
CTTTCAACAAGCACCCCAGTGATTTTGACACCCAGCCTGGTCTAGAAACCACTGTCCTCAAGCACACAGGCATCCAA
GGTCAGCAGGCCCTCGAGTACCTCATCAGGCCAGAAGGAGTCTCTACCCATCCTTATGTAATGTCTTCTGCTCTGAT
CAGCTCTGGAAGCAGGCCTCGATTTGATTCCCATCTGGACCAATTCCCAGCTTAGGCAGGGGCCATAATTTGCTAAA
CCCATTTCTCACTTTTAAAATGAGAATCAACCTCTTGTGATTATTAGGAGAATTTAAACTCAGTAGTATCAGCGAAA
GTAACTTCTGGCTTCCTTCCCTGCCTTTTGTCCCTCCAGCCTTTGCCTGTGTAGAGAAATGTAACAAATACCTTCTT
GTGTTCTTTGTAGCTATGCAGATACAATGTTTTCCCTCCTGGGAAAGAAGTTTCAGTATCTCCTGTGTGTTCTTTCT
TATGATCCAACTAAACATCCAGGTAAAGTTGTTGGGTTTTTTTTTTTTCTTTTACCAGTTGCCTAGTTTCTTGATAT
AAATTCTATGACATGGATAAGAATTATTTTCTCCTAATTTATCTCATAGGAAGCATACTGCATATATACATGGAGAT
AATTCCAGTTTTGACTAATGGGAACTATAAGCATGTTTTTCTCTTCTATATTGTACATGATTTTCTTGTATTCCTTT
CCCATTTTGTTTACCATTCACAATTCAGACTAGAGAAGAGCGGGGAAATGGATGATCCTGATACAGAAGAGAAATCT
CATGAGTCCTATTGGGAAGAAGGAGGAATGTGGTTGGATATTGCATATCCGTATCACCCAAGTGGTAGTGATGTGTT
GGACAGATGCCTTCACATACACAAGCACGGGGTGAGAAGTGAATATGGGGATGCAGAAGTTGTGCAGGAAAAACTCT
AAATTATTGTCCTTTTTTAATTTCTGAAGTTTTATAATCTATCTATTGCATTCTTTTATTTGTTTTGAATCTGTTGG
GGGTATGTTTTCTCCTGGACTCATTTTAATGCATTCAAACATTGAAACTTAACCTTTGTCATGGCTGGAGAAATACA
TAGACTTTTAATTTGTAAGAGTCACCTTTTTGATTTTCAACTGAGCTTTTTAACATGCTTGTTTTGTAAATATTTAC
ATATGTTAGTATTTTGGTTTTTTTGTTTTGTTTTGTTTTTGAGACACAGTCTCACTCTGTGGCCCAGGCTGGAGTGC
AGTGGTTTCATCTCGGCTCACTGCAACGTCCGCCTTCCGGGTTCAAGTGATTCTCCTGCCTCAGCCTCCCAAGTAGC
TGGGATTACAGTGTATGCCATCACACCCAGCTAATTTCTGTATTTTTAGTAGAGACAGGATTTCACCATGTTGGCCA
AGCTGGTCTGGAACTCCTGACCTCAGGTGATCCGCCCTCCTCAGCCTCCCAAAGTGCTGGGATTACAGGCGTGAGCC
ACCGTTCCCAGCTAGTATTTTGTTTCTGCTTGAATAAATTGGGGTCTTAAAAACTCATTAAAAGATGAGACCTAGTG
TCCCTAATTAAATCAGAGACAATCAAATGGAAATAGAAATTAATAGAGGCAGAAGTTAGCTCTGCTAATCTGATTTA
AATTCCATTAATGAACAGAAGCCCTAACAAAGAACCTTTGGGAAGAAAATACAGCAGGCCCTGTCTGGAGGTGGAGT
CTGAGGATACTGCTCTTAGAAGGGGGCGGAAGCTCAGCTTCCTTATACTCTATATCCTGCAGCAGAGCGGGAGGGGT
GTATAAAATGTGGGTGAGTGCAGGAGTTGGTAGAAAATCAGTATGCTAGAAGATGGTTGAAACCCCCAAGGAATCTG
CTGATGGAATCCACTCTGATTTCAATGAGCCTAAGTCCCTTGACCGGTTTAGCTGTCTCATCTAAGCTAAAGATGGA
TATGATGGGGATGTAACATTGCCATCCTCTCAGTAAGTCAATTTATTTCTTTAGTATGAGATTTGCAAAAGAAGAAT
GAGAAGAACATGCCACATCATCACCTATTTGGATAATGAAGTTGTATGTAGAACAAGTACACCTACGTCATTGGAAA
TAAACTCAGAATTTATTTCTCTTTTACCTAGGTCCACCATTTTATGTTCCACATGCTGAAATTGAAAGGTTGTTTGG
TAAGTTTGTGGACTTATGCTGTAACTTTTTAAACAAAGTCAAGTTAACTCTTTTGGGCCTGGCGTGCTGGCTCATGC
CTGTATTTCCAGCACTTTGGGAGGCCAAGGTGGGCAGATCACCTGAGGCCAGGAGTTCGAGACCAGCCTGGCCAACA
TGGCGAAACCCTGTCTCTACAAAAATACAAAAATTAGGCCAGTGTGGTGGCATGTGCCTGTAGTCCCAACTATTTGA
GAGGCTGAGGCATGGGAATTGCTTGAACCTGGGAGGCAGAGAGTGTAGTGAGCCAAGATTGTGCCACTGCACTCCAG
CGTGGGTAACAGAGTGAGACTCCATCTAAAAAAAAAAAACCTATTGTGAACTATTAGTATATTAGTATCTAGAGTAT
GTCTATAAAATTTAAAAGATAAAGACCATTTTATTGAAAGTTGTTTTATCTTAGAAAAGGAACTAATCTCTGTAAAT
ATGCTCTGTATATATGCTATATGCTCTATGTTAAAGGTATTTGAACTTTTCTAGAGAGATGGTATATTTTTTTTTAT
TTGTTTATTTTTGAGATAGGATCTTGATCTGTCACCCAGGCTGGAGTACAGAAGTGCAATCACAGCTCACTGCAGCC
TCGACCTCCCTGGGCACAAGTGATCCTCCCACCTCAGCCTCCCAAGTTTCTGGGACCAGAGGCATGCACCACAATGC
TTAGCTAATTTTTCTATTTTTTTGTAGAGATGGGGTTTAACCACATTGCCCAGGCTGGTCTCGAACTCCTGGGCTCA
AGTGATCCTCTTGTCTTGGCCTCCCAAAGTACTGGGATTAGAGGCATGAGCCGCCATGCCCAGTGGTGTATTTATTT
TTACTCTTGGGAGTTAAAAGTGATAATAACAATTCAGAGTTCAGGAAATTTGCCCTTAGCATTCCTCTGTTTTGATT
AAAAAGAAGAGAAAAATGTTTAGTGTACACTGTTTTTAAAATAATTTCAAGGTTTTGTTTGTTTGTTTTGAGATGGA
GTTTCGCTCTTGTTGCCTAGGCTAGAGCGCGATGGTGCAATCTCAGCTCACTGCAACCTCCATCTCCCGGGTTCAAG
CGATTCTCCTGCCTCAACCTCCCAAGTAGCTGGGATTACAGGCATGTGCCACCATACCCAGCTCATTTTGTATTTTT
AGTAGAGACAGAGTTTCACCATCTTGGCCAGGCTGGTCATGAACTCCTGACCTCAAGTGATCCACCTGCCTCGGCCT
CCCAAAGTGTTGGGATTACAGGTGTGAGCCACCGCACCCAGCCAATTTTGAGTATTTTTAAAAGAATCCCTGATGTC
ATTCTTCATAGTATTTTAACATGTTACTCTTTCTTGTTTCAGGTAAAATATGCAATATACGTTGTCTTGAGAAGGTT
GATGCTTTTGAAGAACGACATAAAAGTTGGGGAATTGACTGTCTTTTTGAAAAGTTATATCTACTTACAGAAAAGTA
AATGAGACATAGATAAAATAAAATCACACTGACATGTTTTTGAGGAATTGAAAATTATGCTAAAGCCTGAAAATGTA
ATGGATGAATTTTTAAAATTGTTTATAAATCATATGATAGATCTTTACTAAAAATGGCTTTTTAGTAAAGCCATTTA
CTTTTTCTAAAAAAGTTTTAGAAGAAAAAGATGTAACTAAACTTTTAAAGTAGCTCCTTTGGAGAGGAGATTATGAT
GTGAAAGATTATGCCTATGTGTCTTGCAGATTGCAAGATATTTTACCAATCAGCATGTGTTACCTGTACAATTAAAA
AAATATTTCAAAATGCAATGCATATTAAATATAATACACACAGAAAAACTGGCATTTATTTTGTTTTATTTTTTTGA
GATGGAGTTTCGTTCTTGTTGCCCAACCTGGAGTGCAATGGTGCAATCTCAGCTCACTGCAACCTCTGCCTCCCAGG
TTCAGGTGATTCTCCTGCCTCAGCCTCCTGAGTAGCTGGGATTACAGGTGTGCGCCACCACGCCCAGCTAATTTTTT
GTATTTTTAGTAGAGACAGGGTTTCACCATGTTGGTCAGGCTGATCTCGAGCTCCTGACCTCAGGTGATCTACCCAC
CTCGGCCTCCCAAAGTGCTGGGATTACAGGCGTGAGCCACTGCACCTGGCCTGACATTCTTTATGAAATTTAGAATT
GTTGAAGAACTATAACATTTCAGTAGGGTTCAAGGTGGTCCCAAAAGTTATATAAAAGATTAGTTTTTACTATAAAC
CCTTGTCTTTTACTCAGATCCTAGCATCCCTTTTCACATGGTTTCTCCATGTATATAACAGAATCAAGAAACAAATT
TTAATTAAACAATCTGTAACAGAATCAAGAAACAAATACATTTTAATTAAACAATCTATATGGAACAAACATTCCCA
AATTCTAAGAATAAATTTTTCTTTAAGTTTTCTCTGAGTTTGGCAATTGTTGTTTTTTATAATTTAATCTGTTTAAA
TCATCAGGTCTTATAAAATATAATGTACTTAGAGCTGGATTCATGGCTGTTTATTATGAAAGGTTAGATTTCTCAGT
TCTTCTTTAACCACATTTTGTTATATCAGACAGTCCTCTATAACTCTGTACTACCCAACAACTAAATGGTTTAGATT
GTTTAGCTCATGTTAATAGGATGGTTGTGTATTATAAAAAACGAGTTACGTGTGTGTGTGCACGCATGCACGCACAT
GTGCTGGCTTAAAGGTTGTTAATGCAAGGTTTGGGGTCCCCTTTAACACTGGTGAAAGCTACGGTACTCTCCCCAGA
GATATGTCTTGTCAGCCTCTCTAGTTCCCCTTGGCCTGCATGTACAAACTTCTACCCTAGAAGCTCTCTGCCATCGA
TGTATTCTAATAGATTTGTAAGGCTATTAATTTGAAGCAACTCCTTGCTCACAGTGATTCTTGCTTCTCTGAGACCT
GCTCCCAGTCGATACTGTGGGCTTCAGAAGCCATGACTCCCCAACTCTGCCTGTATCACCGGTTGAATGGACAACTA
ACCCGAGCTGGACCAACACAATTCTCTCCAGAGACTTTTGATTTTACTTTTATGTAGAGACAGGGTCTCACTTTGTT
GCCCACGCTGATGTTGAACTTGACGTGAGGCCTCAAGCAGTCCTCCTGTCTTGGCCACCCAAAGTGCTAGGATTACA
GGTATGAGCCATTGCGCTGGCCCTCTTCATAGGCTTTTGGACTTGGGAATAGAAAAGCAACCCCGTCTCTACTAAAA
ATACAAAAAAATTAGCCAGGCGTGGTGGCACGTGCCTGTAATCCCAGCTACTTGGGAGGCTGAGGCAGGAGAATCAC
TTGAACCTAGGAGGCGGAGGTTGCAGTGAGCTGAGATCATGCCACTGCACGCAAGCCTGGGCAACAGAGCAAGACTC
TGTCTCAAAAGAAAGAAAAAGAAAAGAAAAAAAAGAAAGGCAAGTTGACTGCTGAAAGGGGAATCTGTGTACGCCTG
GGAGCTGTGGGGCAGCCACATTCCAGCACATGGATCTGAGAAACAGAACGCTGATCTGCAGAAAGAGATGAGAACCA
AAGAGAGGCCACCTGCGTCCTGGGTCCATTTTCATCCTCCCTGAAGCCCAGCTGCCCAGGGTGGGGAGAAACACCCT
GTGTCCATGGGATAGAGTCCTTTCCGCTTGCAGTTGTGCCCAAAGAATCTTAAATACAAATGAGATATCCTTAGGTA
GTTGATCATTTATGTAATATGTGTCTTCACTGGGGAATACTGACTTCCTAAAATCTCAAGATGGAAGATATACCACA
TGTAAATTATTTTAGAGCAATTAAATTGTTTTCAGGATTTTCCAAAAA

### Tables

TABLE 9
Pharmacogenomic Marker Mutations

| SNP ID | CHR | POS | REF | ALT | Gene | Haplotype |
|---|---|---|---|---|---|---|
| rs9923231 | 16 | 31096368 | C | A | BCKDK, PRSS53, | VKORC*2 |
| | | | | | VKORC1 | |
| rs9923231 | 16 | 31096368 | C | G | BCKDK, PRSS53, | VKORC*2 |
| | | | | | VKORC1 | |
| rs9923231 | 16 | 31096368 | C | T | BCKDK, PRSS53, | VKORC*2 |
| | | | | | VKORC1 | |
| rs1800559 | 1 | 201060815 | C | T | CACNA1S | |
| rs1800559 | 1 | 201060815 | C | A | CACNA1S | |
| rs772226819 | 1 | 201091993 | G | A | CACNA1S | |
| rs3745274 | 19 | 41006936 | G | A | CYP2A7P1, | |
| | | | | | CYP2B6 | |
| rs3745274 | 19 | 41006936 | G | T | CYP2A7P1, | |
| | | | | | CYP2B6 | |
| rs2279343 | 19 | 41009358 | A | G | CYP2B6 | |
| rs28399499 | 19 | 41012316 | T | C | CYP2B6 | |
| rs3211371 | 19 | 41016810 | C | A | CYP2B6 | |
| rs3211371 | 19 | 41016810 | C | T | CYP2B6 | |
| rs3211371 | 19 | 41016810 | C | G | CYP2B6 | |
| rs34223104 | 19 | 40991224 | T | C | CYP2B6 | |
| rs34826503 | 19 | 41012339 | C | T | CYP2B6 | |
| rs36056539 | 19 | 41006923 | C | T | CYP2B6 | |
| rs12248560 | 10 | 94761900 | C | T | CYP2C19 | CYP2C19*4 |
| rs12769205 | 10 | 94775367 | A | G | CYP2C19 | CYP2C19*2 |
| rs3758581 | 10 | 94842866 | A | G | CYP2C19 | CYP2C19*1 |
| rs4244285 | 10 | 94781859 | G | A | CYP2C19 | CYP2C19*2 |
| rs4986893 | 10 | 94780653 | G | A | CYP2C19 | CYP2C19*3 |
| rs1057910 | 10 | 94981296 | A | C | CYP2C9 | CYP2C9*3 |
| rs1799853 | 10 | 94942290 | C | T | CYP2C9 | CYP2C9*2 |
| rs28371685 | 10 | 94981224 | C | T | CYP2C9 | CYP2C9*11 |
| rs28371686 | 10 | 94981301 | C | G | CYP2C9 | CYP2C9*5 |
| rs7900194 | 10 | 94942309 | G | A | CYP2C9 | CYP2C9*8 |
| rs7900194 | 10 | 94942309 | G | A | CYP2C9 | CYP2C9*27 |
| rs7900194 | 10 | 94942309 | G | T | CYP2C9 | CYP2C9*8 |
| rs7900194 | 10 | 94942309 | G | T | CYP2C9 | CYP2C9*27 |
| rs9332094 | 10 | 94936917 | T | C | CYP2C9 | CYP2C9*8 |
| rs9332131 | 10 | 94949281 | GA | G | CYP2C9 | CYP2C9*6 |
| rs1065852 | 22 | 42130692 | G | A | CYP2D6 | CYP2D6*4 |
| rs1135822 | 22 | 42129180 | A | T | CYP2D6 | CYP2D6*49 |
| rs1135833 | 22 | 42126663 | G | C | CYP2D6 | CYP2D6*4 |
| rs1135835 | 22 | 42126660 | T | C | CYP2D6 | CYP2D6*4 |
| rs1135837 | 22 | 42126633 | C | A | CYP2D6 | CYP2D6*4 |
| rs1135838 | 22 | 42126627 | A | C | CYP2D6 | CYP2D6*4 |
| rs1135840 | 22 | 42126611 | C | G | CYP2D6 | CYP2D6*2 |
| rs16947 | 22 | 42127941 | G | A | CYP2D6 | CYP2D6*2 |
| rs28371706 | 22 | 42129770 | G | A | CYP2D6 | CYP2D6*17 |
| rs28371706 | 22 | 42129770 | G | A | CYP2D6 | CYP2D6*82 |
| rs28371706 | 22 | 42129770 | G | T | CYP2D6 | CYP2D6*17 |
| rs28371706 | 22 | 42129770 | G | T | CYP2D6 | CYP2D6*82 |
| rs28371725 | 22 | 42127803 | C | T | CYP2D6 | CYP2D6*41 |
| rs28371735 | 22 | 42126636 | G | A | CYP2D6 | CYP2D6*4 |
| rs35742686 | 22 | 42128241 | CT | C | CYP2D6 | CYP2D6*3 |
| rs3892097 | 22 | 42128945 | C | T | CYP2D6 | CYP2D6*4 |
| rs5030656 | 22 | 42128173 | CCTT | C | CYP2D6 | CYP2D6*9 |
| rs5030862 | 22 | 42130668 | C | T | CYP2D6 | CYP2D6*12 |
| rs59421388 | 22 | 42127608 | C | T | CYP2D6 | CYP2D6*29 |
| rs61736512 | 22 | 42129132 | C | T | CYP2D6 | CYP2D6*29 |
| rs72549356 | 22 | 42128927 | T | TGGGG | CYP2D6 | CYP2D6*30 |
| | | | | CGAAA | | |
| | | | | GGGGC | | |
| | | | | GAAA | | |
| | | | | (SEQ | | |
| | | | | ID NO: | | |
| | | | | 2218) | | |
| rs72549356 | 22 | 42128927 | T | TGGGG | CYP2D6 | CYP2D6*40 |
| | | | | CGAAA | | |
| | | | | GGGGC | | |
| | | | | GAAA | | |
| | | | | (SEQ | | |
| | | | | ID NO: | | |
| | | | | 2218) | | |
| rs74478221 | 22 | 42126624 | C | T | CYP2D6 | CYP2D6*4 |
| rs75467367 | 22 | 42126623 | G | C | CYP2D6 | CYP2D6*4 |
| rs766507177 | 22 | 42126635 | T | G | CYP2D6 | CYP2D6*4 |
| rs776746 | 7 | 99672916 | T | C | CYP3A, CYP3A5, | |
| | | | | | ZSCAN25 | |
| rs10264272 | 7 | 99665212 | C | T | CYP3A5, | |
| | | | | | ZSCAN25 | |
| rs41303343 | 7 | 99652770 | T | TA | CYP3A5, | |
| | | | | | ZSCAN25 | |
| rs2108622 | 19 | 15879621 | C | T | CYP4F2 | CYP4F2*3 |
| rs3918290 | 1 | 97450058 | C | G | DPYD | |
| rs3918290 | 1 | 97450058 | C | T | DPYD | |
| rs55886062 | 1 | 97515787 | A | T | DPYD | |
| rs55886062 | 1 | 97515787 | A | C | DPYD | |
| rs56038477 | 1 | 97573863 | C | T | DPYD | |
| rs67376798 | 1 | 97082391 | T | A | DPYD | |
| rs6025 | 1 | 169549811 | C | T | F5 | |
| rs2395029 | 6 | 31464003 | T | G | HCP5 | |
| rs1061235 | 6 | 29945521 | A | T | HLA-A | |
| rs17179220 | 6 | 29853458 | G | A | | |
| rs10484555 | 6 | 31313688 | T | C | | |
| rs58102217 | 6 | 31378878 | G | A | | |
| rs12979860 | 19 | 39248147 | C | T | IFNL3, IFNL4 | |
| rs116855232 | 13 | 48045719 | C | T | NUDT15 | NUDT15*2 |
| rs9263726 | 6 | 31138722 | G | A | PSORS1C1, | |
| | | | | | PSORS1C2 | |
| rs111888148 | 19 | 38455463 | G | T | RYR1 | |
| rs111888148 | 19 | 38455463 | G | A | RYR1 | |
| rs112563513 | 19 | 38499223 | G | A | RYR1 | |
| rs118192116 | 19 | 38451850 | C | T | RYR1 | |
| rs118192116 | 19 | 38451850 | C | G | RYR1 | |
| rs118192122 | 19 | 38500643 | G | A | RYR1 | |
| rs118192124 | 19 | 38500636 | C | T | RYR1 | |
| rs118192161 | 19 | 38444211 | C | T | RYR1 | |
| rs118192162 | 19 | 38455359 | A | G | RYR1 | |
| rs118192162 | 19 | 38455359 | A | C | RYR1 | |
| rs118192163 | 19 | 38494565 | G | C | RYR1 | |
| rs118192163 | 19 | 38494565 | G | A | RYR1 | |
| rs118192167 | 19 | 38580004 | A | G | RYR1 | |
| rs118192168 | 19 | 38580403 | G | A | RYR1 | |
| rs118192170 | 19 | 38584989 | T | C | RYR1 | |
| rs118192172 | 19 | 38457545 | C | T | RYR1 | |
| rs118192175 | 19 | 38494564 | C | T | RYR1 | |
| rs118192176 | 19 | 38494579 | G | A | RYR1 | |
| rs118192177 | 19 | 38496283 | C | G | RYR1 | |
| rs118192177 | 19 | 38496283 | C | T | RYR1 | |
| rs118192178 | 19 | 38500898 | C | T | RYR1 | |
| rs118192178 | 19 | 38500898 | C | G | RYR1 | |
| rs121918592 | 19 | 38448712 | G | C | RYR1 | |
| rs121918592 | 19 | 38448712 | G | A | RYR1 | |
| rs121918593 | 19 | 38499993 | G | A | RYR1 | |
| rs121918594 | 19 | 38500655 | G | T | RYR1 | |
| rs121918594 | 19 | 38500655 | G | A | RYR1 | |
| rs121918595 | 19 | 38580094 | C | T | RYR1 | |
| rs121918596 | 19 | 38499645 | GGAG | G | RYR1 | |
| rs144336148 | 19 | 38455472 | G | A | RYR1 | |
| rs1801086 | 19 | 38446710 | G | T | RYR1 | |
| rs1801086 | 19 | 38446710 | G | A | RYR1 | |
| rs1801086 | 19 | 38446710 | G | C | RYR1 | |
| rs193922747 | 19 | 38440802 | T | C | RYR1 | |
| rs193922748 | 19 | 38440829 | C | T | RYR1 | |
| rs193922753 | 19 | 38444212 | G | A | RYR1 | |
| rs193922753 | 19 | 38444212 | G | T | RYR1 | |
| rs193922762 | 19 | 38448673 | C | A | RYR1 | |
| rs193922762 | 19 | 38448673 | C | T | RYR1 | |
| rs193922764 | 19 | 38451842 | C | G | RYR1 | |
| rs193922764 | 19 | 38451842 | C | T | RYR1 | |
| rs193922768 | 19 | 38455471 | C | G | RYR1 | |
| rs193922768 | 19 | 38455471 | C | T | RYR1 | |
| rs193922768 | 19 | 38455471 | C | A | RYR1 | |
| rs193922770 | 19 | 38455528 | C | T | RYR1 | |
| rs193922772 | 19 | 38457546 | G | A | RYR1 | |
| rs193922772 | 19 | 38457546 | G | T | RYR1 | |
| rs193922802 | 19 | 38499655 | G | A | RYR1 | |
| rs193922803 | 19 | 38499670 | C | T | RYR1 | |
| rs193922807 | 19 | 38499731 | G | C | RYR1 | |
| rs193922809 | 19 | 38499975 | G | A | RYR1 | |
| rs193922816 | 19 | 38500642 | C | T | RYR1 | |
| rs193922818 | 19 | 38500899 | G | A | RYR1 | |
| rs193922832 | 19 | 38512321 | G | A | RYR1 | |
| rs193922843 | 19 | 38543832 | G | T | RYR1 | |
| rs193922876 | 19 | 38580114 | C | T | RYR1 | |
| rs193922878 | 19 | 38580370 | C | G | RYR1 | |
| rs28933396 | 19 | 38499997 | G | T | RYR1 | |
| rs28933396 | 19 | 38499997 | G | A | RYR1 | |
| rs28933397 | 19 | 38500654 | C | T | RYR1 | |
| rs63749869 | 19 | 38580440 | G | A | RYR1 | |
| rs4149056 | 12 | 21178615 | T | C | SLCO1B1 | |
| rs1142345 | 6 | 18130687 | T | C | TPMT | |
| rs1142345 | 6 | 18130687 | T | G | TPMT | |
| rs1800460 | 6 | 18138997 | C | T | TPMT | |
| rs1800462 | 6 | 18143724 | C | G | TPMT | |
| rs1800584 | 6 | 18130781 | C | T | TPMT | |
| rs8175347 | 2 | 233760235 | <(TA)5> | <(TA)6> | UGT1A1, | |
| | | | (SEQ | (SEQ | UGT1A10, | |
| | | | ID NO: | ID NO: | UGT1A3, | |
| | | | 2219) | 2220) | UGT1A4, | |
| | | | | | UGT1A5, | |
| | | | | | UGT1A6, | |
| | | | | | UGT1A7, | |
| | | | | | UGT1A8, | |
| | | | | | UGT1A9 | |
| rs8175347 | 2 | 233760235 | <(TA)5> | <(TA)7> | UGT1A1, | |
| | | | (SEQ | (SEQ | UGT1A10, | |
| | | | ID NO: | ID NO: | UGT1A3, | |
| | | | 2219) | 2221) | UGT1A4, | |
| | | | | | UGT1A5, | |
| | | | | | UGT1A6, | |
| | | | | | UGT1A7, | |
| | | | | | UGT1A8, | |
| | | | | | UGT1A9 | |
| rs8175347 | 2 | 233760235 | <(TA)5> | <(TA)8> | UGT1A1, | |
| | | | (SEQ | (SEQ | UGT1A10, | |
| | | | ID NO: | ID NO: | UGT1A3, | |
| | | | 2219) | 2222) | UGT1A4, | |
| | | | | | UGT1A5, | |
| | | | | | UGT1A6, | |
| | | | | | UGT1A7, | |
| | | | | | UGT1A8, | |
| | | | | | UGT1A9 | |
| rs887829 | 2 | 233759924 | C | T | UGT1A1, | UGT1A1*80 |
| | | | | | UGT1A10, | |
| | | | | | UGT1A3, | |
| | | | | | UGT1A4, | |
| | | | | | UGT1A5, | |
| | | | | | UGT1A6, | |
| | | | | | UGT1A7, | |
| | | | | | UGT1A8, | |
| | | | | | UGT1A9 | |
| rs3869066 | 6 | 30035987 | A | G | ZNRD1-AS1 | |
| rs113993958 | 7 | 117530953 | G | T | CFTR | |
| rs113993958 | 7 | 117530953 | G | C | CFTR | |
| rs113993959 | 7 | 117587778 | G | A | CFTR | |
| rs113993959 | 7 | 117587778 | G | T | CFTR | |
| rs115545701 | 7 | 117509089 | C | T | CFTR | |
| rs11971167 | 7 | 117642528 | G | T | CFTR | |
| rs11971167 | 7 | 117642528 | G | A | CFTR | |
| rs121908745 | 7 | 117559589 | CATC | C | CFTR | |
| rs121908746 | 7 | 117592218 | AA | A | CFTR | |
| rs121908747 | 7 | 117627580 | CC | C | CFTR | |
| rs121908748 | 7 | 117590440 | G | A | CFTR | |
| rs121908748 | 7 | 117590440 | G | C | CFTR | |
| rs121908748 | 7 | 117590440 | G | T | CFTR | |
| rs121908751 | 7 | 117530899 | G | A | CFTR | |
| rs121908751 | 7 | 117530899 | G | T | CFTR | |
| rs121908752 | 7 | 117535285 | T | G | CFTR | |
| rs121908753 | 7 | 117540285 | G | A | CFTR | |
| rs121908755 | 7 | 117587800 | G | T | CFTR | |
| rs121908755 | 7 | 117587800 | G | A | CFTR | |
| rs121908757 | 7 | 117587799 | A | C | CFTR | |
| rs121909005 | 7 | 117587801 | T | C | CFTR | |
| rs121909005 | 7 | 117587801 | T | G | CFTR | |
| rs121909011 | 7 | 117540230 | C | T | CFTR | |
| rs121909013 | 7 | 117587805 | G | A | CFTR | |
| rs121909017 | 7 | 117559546 | C | T | CFTR | |
| rs121909019 | 7 | 117611638 | G | T | CFTR | |
| rs121909019 | 7 | 117611638 | G | A | CFTR | |
| rs121909020 | 7 | 117611640 | G | C | CFTR | |
| rs121909020 | 7 | 117611640 | G | A | CFTR | |
| rs121909036 | 7 | 117611635 | T | C | CFTR | |
| rs121909036 | 7 | 117611635 | T | G | CFTR | |
| rs121909041 | 7 | 117642483 | T | A | CFTR | |
| rs121909041 | 7 | 117642483 | T | C | CFTR | |
| rs121909047 | 7 | 117590355 | C | A | CFTR | |
| rs139304906 | 7 | 117611671 | T | C | CFTR | |
| rs139573311 | 7 | 117559471 | T | C | CFTR | |
| rs141033578 | 7 | 117606695 | C | G | CFTR | |
| rs141033578 | 7 | 117606695 | C | T | CFTR | |
| rs150212784 | 7 | 117611595 | T | C | CFTR | |
| rs150212784 | 7 | 117611595 | T | G | CFTR | |
| rs151020603 | 7 | 117504336 | C | A | CFTR | |
| rs151020603 | 7 | 117504336 | C | T | CFTR | |
| rs1800088 | 7 | 117542063 | G | A | CFTR | |
| rs1800088 | 7 | 117542063 | G | T | CFTR | |
| rs1800100 | 7 | 117592169 | C | T | CFTR | |
| rs1800111 | 7 | 117610521 | G | C | CFTR | |
| rs186045772 | 7 | 117611663 | T | A | CFTR | |
| rs193922525 | 7 | 117664770 | G | A | CFTR | |
| rs200321110 | 7 | 117611646 | G | A | CFTR | |
| rs202179988 | 7 | 117611649 | C | T | CFTR | |
| rs267606723 | 7 | 117642451 | G | A | CFTR | |
| rs267606723 | 7 | 117642451 | G | T | CFTR | |
| rs34911792 | 7 | 117627758 | T | G | CFTR | |
| rs36210737 | 7 | 117611743 | T | A | CFTR | |
| rs36210737 | 7 | 117611743 | T | G | CFTR | |
| rs368505753 | 7 | 117509069 | C | T | CFTR | |
| rs397508139 | 7 | 117540237 | T | C | CFTR | |
| rs397508139 | 7 | 117540237 | T | A | CFTR | |
| rs397508144 | 7 | 117540251 | T | C | CFTR | |
| rs397508256 | 7 | 117509035 | G | A | CFTR | |
| rs397508267 | 7 | 117590353 | A | C | CFTR | |
| rs397508276 | 7 | 117590378 | T | C | CFTR | |
| rs397508276 | 7 | 117590378 | T | G | CFTR | |
| rs397508288 | 7 | 117590409 | A | C | CFTR | |
| rs397508288 | 7 | 117590409 | A | G | CFTR | |
| rs397508328 | 7 | 117480095 | A | G | CFTR | |
| rs397508435 | 7 | 117603654 | T | C | CFTR | |
| rs397508435 | 7 | 117603654 | T | A | CFTR | |
| rs397508442 | 7 | 117603708 | C | T | CFTR | |
| rs397508453 | 7 | 117603782 | G | C | CFTR | |
| rs397508453 | 7 | 117603782 | G | A | CFTR | |
| rs397508510 | 7 | 117611601 | C | T | CFTR | |
| rs397508510 | 7 | 117611601 | C | G | CFTR | |
| rs397508513 | 7 | 117611620 | A | C | CFTR | |
| rs397508537 | 7 | 117530955 | C | A | CFTR | |
| rs397508602 | 7 | 117642465 | G | A | CFTR | |
| rs397508759 | 7 | 117534363 | G | T | CFTR | |
| rs397508759 | 7 | 117534363 | G | A | CFTR | |
| rs74503330 | 7 | 117642472 | G | A | CFTR | |
| rs74551128 | 7 | 117548795 | C | T | CFTR | |
| rs74551128 | 7 | 117548795 | C | A | CFTR | |
| rs74597325 | 7 | 117587811 | C | G | CFTR | |
| rs74597325 | 7 | 117587811 | C | T | CFTR | |
| rs74767530 | 7 | 117627537 | C | T | CFTR | |
| rs75039782 | 7 | 117639961 | C | G | CFTR | |
| rs75039782 | 7 | 117639961 | C | T | CFTR | |
| rs75096551 | 7 | 117606754 | G | A | CFTR | |
| rs75096551 | 7 | 117606754 | G | C | CFTR | |
| rs75096551 | 7 | 117606754 | G | T | CFTR | |
| rs75527207 | 7 | 117587806 | G | A | CFTR | |
| rs75541969 | 7 | 117614699 | G | C | CFTR | |
| rs75549581 | 7 | 117587829 | G | A | CFTR | |
| rs75549581 | 7 | 117587829 | G | T | CFTR | |
| rs75961395 | 7 | 117509123 | G | A | CFTR | |
| rs75961395 | 7 | 117509123 | G | T | CFTR | |
| rs76713772 | 7 | 117587738 | G | A | CFTR | |
| rs77010898 | 7 | 117642566 | G | C | CFTR | |
| rs77010898 | 7 | 117642566 | G | A | CFTR | |
| rs77188391 | 7 | 117534366 | G | T | CFTR | |
| rs77409459 | 7 | 117540243 | C | T | CFTR | |
| rs77646904 | 7 | 117559629 | G | A | CFTR | |
| rs77646904 | 7 | 117559629 | G | C | CFTR | |
| rs77646904 | 7 | 117559629 | G | T | CFTR | |
| rs77834169 | 7 | 117530974 | C | G | CFTR | |
| rs77834169 | 7 | 117530974 | C | A | CFTR | |
| rs77834169 | 7 | 117530974 | C | T | CFTR | |
| rs77932196 | 7 | 117540270 | G | T | CFTR | |
| rs77932196 | 7 | 117540270 | G | A | CFTR | |
| rs77932196 | 7 | 117540270 | G | C | CFTR | |
| rs78194216 | 7 | 117611637 | C | A | CFTR | |
| rs78194216 | 7 | 117611637 | C | T | CFTR | |
| rs78655421 | 7 | 117530975 | G | C | CFTR | |
| rs78655421 | 7 | 117530975 | G | A | CFTR | |
| rs78655421 | 7 | 117530975 | G | T | CFTR | |
| rs78756941 | 7 | 117531115 | G | T | CFTR | |
| rs78769542 | 7 | 117611650 | G | C | CFTR | |
| rs78769542 | 7 | 117611650 | G | A | CFTR | |
| rs79635528 | 7 | 117611695 | A | C | CFTR | |
| rs79635528 | 7 | 117611695 | A | G | CFTR | |
| rs80034486 | 7 | 117652877 | C | G | CFTR | |
| rs80055610 | 7 | 117587833 | G | A | CFTR | |
| rs80055610 | 7 | 117587833 | G | C | CFTR | |
| rs80224560 | 7 | 117602868 | G | A | CFTR | |
| rs80282562 | 7 | 117534318 | G | A | CFTR | |
| rs113993960 | 7 | 117559591 | TCTT | T | CFTR | |
| rs199826652 | 7 | 117559591 | TCTT | T | CFTR | |
| rs33926104 | 19 | 40991390 | C | A | CYP2B6 | |
| rs33926104 | 19 | 40991390 | C | T | CYP2B6 | |
| rs33973337 | 19 | 40991381 | A | T | CYP2B6 | |
| rs33980385 | 19 | 40991388 | A | G | CYP2B6 | |
| rs34284776 | 19 | 40991391 | G | A | CYP2B6 | |
| rs34284776 | 19 | 40991391 | G | C | CYP2B6 | |
| rs8192709 | 19 | 40991369 | C | T | CYP2B6 | |
| rs17884712 | 10 | 94775489 | G | A | CYP2C19 | CYP2C19*9 |
| rs28399504 | 10 | 94762706 | A | G | CYP2C19 | CYP2C19*4 |
| rs41291556 | 10 | 94775416 | T | C | CYP2C19 | CYP2C19*8 |
| rs56337013 | 10 | 94852738 | C | T | CYP2C19 | CYP2C19*5 |
| rs6413438 | 10 | 94781858 | C | T | CYP2C19 | CYP2C19*10 |
| rs72552267 | 10 | 94775453 | G | A | CYP2C19 | CYP2C19*6 |
| rs72558186 | 10 | 94781999 | T | A | CYP2C19 | CYP2C19*7 |
| rs72558184 | 10 | 94775453 | G | A | | |
| rs72558187 | 10 | 94941958 | T | C | CYP2C9 | CYP2C9*13 |
| rs72558190 | 10 | 94947782 | C | A | CYP2C9 | CYP2C9*15 |
| rs9332239 | 10 | 94989020 | C | T | CYP2C9 | CYP2C9*12 |
| rs267608309 | 22 | 42129821 | G | A | CYP2D6 | CYP2D6*48 |
| rs28371710 | 22 | 42129075 | C | T | CYP2D6 | CYP2D6*12 |
| rs28371717 | 22 | 42128308 | C | A | CYP2D6 | CYP2D6*33 |
| rs5030655 | 22 | 42129083 | CA | C | CYP2D6 | CYP2D6*6 |
| rs5030865 | 22 | 42129033 | C | A | CYP2D6 | CYP2D6*8 |
| rs5030865 | 22 | 42129033 | C | A | CYP2D6 | CYP2D6*14 |
| rs5030865 | 22 | 42129033 | C | T | CYP2D6 | CYP2D6*8 |
| rs5030865 | 22 | 42129033 | C | T | CYP2D6 | CYP2D6*14 |
| rs769258 | 22 | 42130761 | C | T | CYP2D6 | CYP2D6*35 |
| rs1050829 | X | 154535277 | T | A | G6PD | |
| rs1050829 | X | 154535277 | T | C | G6PD | |
| rs137852313 | X | 154535187 | C | T | G6PD | |
| rs137852314 | X | 154534495 | C | T | G6PD | |
| rs137852315 | X | 154536032 | C | T | G6PD | |
| rs137852316 | X | 154532676 | C | T | G6PD | |
| rs137852317 | X | 154532411 | C | T | G6PD | |
| rs137852318 | X | 154533596 | C | A | G6PD | |
| rs137852318 | X | 154533596 | C | G | G6PD | |
| rs137852318 | X | 154533596 | C | T | G6PD | |
| rs137852319 | X | 154534157 | A | C | G6PD | |
| rs137852319 | X | 154534157 | A | G | G6PD | |
| rs137852320 | X | 154532698 | T | C | G6PD | |
| rs137852321 | X | 154532694 | C | T | G6PD | |
| rs137852322 | X | 154532701 | A | G | G6PD | |
| rs137852323 | X | 154532626 | C | A | G6PD | |
| rs137852324 | X | 154532389 | C | T | G6PD | |
| rs137852325 | X | 154532662 | C | T | G6PD | |
| rs137852326 | X | 154534345 | C | A | G6PD | |
| rs137852326 | X | 154534345 | C | G | G6PD | |
| rs137852327 | X | 154533122 | C | T | G6PD | |
| rs137852328 | X | 154534125 | C | A | G6PD | |
| rs137852328 | X | 154534125 | C | T | G6PD | |
| rs137852329 | X | 154532765 | G | T | G6PD | |
| rs137852330 | X | 154534390 | G | A | G6PD | |
| rs137852331 | X | 154534489 | T | C | G6PD | |
| rs137852332 | X | 154534389 | C | G | G6PD | |
| rs137852332 | X | 154534389 | C | T | G6PD | |
| rs137852333 | X | 154532797 | G | A | G6PD | |
| rs137852334 | X | 154532695 | G | A | G6PD | |
| rs137852335 | X | 154532674 | C | G | G6PD | |
| rs137852336 | X | 154532625 | C | T | G6PD | |
| rs137852337 | X | 154532434 | C | G | G6PD | |
| rs137852337 | X | 154532434 | C | T | G6PD | |
| rs137852339 | X | 154533044 | C | T | G6PD | |
| rs137852342 | X | 154532969 | G | A | G6PD | |
| rs137852343 | X | 154534465 | A | G | G6PD | |
| rs137852344 | X | 154532245 | G | C | G6PD | |
| rs137852345 | X | 154532772 | G | A | G6PD | |
| rs137852346 | X | 154533634 | C | T | G6PD | |
| rs137852347 | X | 154533029 | A | G | G6PD | |
| rs137852348 | X | 154532203 | G | C | G6PD | |
| rs137852349 | X | 154535996 | A | G | G6PD | |
| rs138687036 | X | 154535963 | G | A | G6PD | |
| rs2230037 | X | 154532439 | A | G | G6PD | |
| rs267606835 | X | 154535336 | G | A | G6PD | |
| rs267606835 | X | 154535336 | G | C | G6PD | |
| rs267606836 | X | 154534438 | G | A | G6PD | |
| rs34193178 | X | 154532945 | C | G | G6PD | |
| rs34193178 | X | 154532945 | C | T | G6PD | |
| rs371489738 | X | 154532722 | C | T | G6PD | |
| rs398123544 | X | 154532956 | T | A | G6PD | |
| rs398123546 | X | 154532390 | G | A | G6PD | |
| rs5030869 | X | 154532990 | C | T | G6PD | |
| rs5030870 | X | 154535316 | C | T | G6PD | |
| rs5030872 | X | 154534440 | T | A | G6PD | |
| rs587776730 | X | 154533012 | CGTGG | C | G6PD | |
| | | | GGTCG | | | |
| | | | TCCAG | | | |
| | | | GTACC | | | |
| | | | CTTTG | | | |
| | | | (SEQ | | | |
| | | | ID NO: | | | |
| | | | 2223) | | | |
| rs72554664 | X | 154532257 | C | T | G6PD | |
| rs72554665 | X | 154532269 | C | A | G6PD | |
| rs72554665 | X | 154532269 | C | G | G6PD | |
| rs72554665 | X | 154532269 | C | T | G6PD | |
| rs74575103 | X | 154533586 | C | T | G6PD | |
| rs76645461 | X | 154536156 | A | G | G6PD | |
| rs76723693 | X | 154533025 | A | G | G6PD | |
| rs782090947 | X | 154535995 | T | C | G6PD | |
| rs782098548 | X | 154532459 | C | T | G6PD | |
| rs782308266 | X | 154535962 | C | T | G6PD | |
| rs782487723 | X | 154535180 | C | T | G6PD | |
| rs782754619 | X | 154534348 | T | C | G6PD | |
| rs782757170 | X | 154534102 | G | A | G6PD | |
| rs78365220 | X | 154535270 | A | G | G6PD | |
| rs78478128 | X | 154536168 | G | C | G6PD | |
| . | X | 154534418 | GGAG | G | G6PD, IKBKG | |
| rs1050828 | X | 154536002 | C | T | G6PD, IKBKG | |
| rs137852338 | X | 154546050 | TGAT | T | G6PD, IKBKG | |
| rs137852340 | X | 154546061 | T | C | G6PD, IKBKG | |
| rs5030868 | X | 154534419 | G | A | G6PD, IKBKG | |
| rs746071566 | 13 | 48037782 | AGGAG | A | NUDT15, | NUDT15*2 |
| | | | TC | | SUCLA2 | |
| rs746071566 | 13 | 48037782 | AGGAG | A | NUDT15, | NUDT15*9 |
| | | | TC | | SUCLA2 | |
| rs869320766 | 13 | 48037801 | G | GGAGT | NUDT15, | |
| | | | | CG | SUCLA2 | |
| rs35350960 | 2 | 233760973 | C | A | UGT1A1, | UGT1A1*27 |
| | | | | | UGT1A10, | |
| | | | | | UGT1A3, | |
| | | | | | UGT1A4, | |
| | | | | | UGT1A5, | |
| | | | | | UGT1A6, | |
| | | | | | UGT1A7, | |
| | | | | | UGT1A8, | |
| | | | | | UGT1A9 | |
| rs35350960 | 2 | 233760973 | C | T | UGT1A1, | UGT1A1*27 |
| | | | | | UGT1A10, | |
| | | | | | UGT1A3, | |
| | | | | | UGT1A4, | |
| | | | | | UGT1A5, | |
| | | | | | UGT1A6, | |
| | | | | | UGT1A7, | |
| | | | | | UGT1A8, | |
| | | | | | UGT1A9 | |
| rs4148323 | 2 | 233760498 | G | A | UGT1A1, | UGT1A1*6 |
| | | | | | UGT1A10, | |
| | | | | | UGT1A3, | |
| | | | | | UGT1A4, | |
| | | | | | UGT1A5, | |
| | | | | | UGT1A6, | |
| | | | | | UGT1A7, | |
| | | | | | UGT1A8, | |
| | | | | | UGT1A9 | |
| rs149403002 | 19 | 41004093 | T | G | | |
| rs138100349 | 22 | 42130710 | G | A | CYP2D6 | CYP2D6*22 |
| rs148769737 | 22 | 42128217 | G | T | CYP2D6 | CYP2D6*84 |
| rs199535154 | 22 | 42128812 | A | G | CYP2D6 | CYP2D6*20 |
| rs201377835 | 22 | 42129910 | C | G | CYP2D6 | CYP2D6*11 |
| rs267608276 | 22 | 42129827 | C | G | CYP2D6 | CYP2D6*99 |
| rs267608279 | 22 | 42127962 | TG | T | CYP2D6 | CYP2D6*100 |
| rs267608297 | 22 | 42128235 | G | A | CYP2D6 | CYP2D6*54 |
| rs267608302 | 22 | 42129071 | T | G | CYP2D6 | CYP2D6*50 |
| rs267608311 | 22 | 42129906 | G | A | CYP2D6 | CYP2D6*57 |
| rs267608313 | 22 | 42130719 | G | A | CYP2D6 | CYP2D6*47 |
| rs267608319 | 22 | 42126749 | C | T | CYP2D6 | CYP2D6*31 |
| rs5030867 | 22 | 42127856 | T | G | CYP2D6 | CYP2D6*7 |
| rs72549346 | 22 | 42127531 | C | CAC | CYP2D6 | CYP2D6*42 |
| rs72549347 | 22 | 42127590 | G | A | CYP2D6 | CYP2D6*56 |
| rs72549348 | 22 | 42127619 | T | G | CYP2D6 | CYP2D6*51 |
| rs72549349 | 22 | 42127841 | C | G | CYP2D6 | CYP2D6*44 |
| rs72549351 | 22 | 42128200 | CAGTC | C | CYP2D6 | CYP2D6*38 |
| rs72549352 | 22 | 42128211 | C | CG | CYP2D6 | CYP2D6*21 |
| rs72549353 | 22 | 42128248 | CAGTT | C | CYP2D6 | CYP2D6*19 |
| rs72549354 | 22 | 42128817 | C | CC | CYP2D6 | CYP2D6*20 |
| rs730882170 | 22 | 42127845 | GCACA | G | CYP2D6 | CYP2D6*101 |
| | | | TCCGG | | | |
| | | | ATGTA | | | |
| | | | GGATC | | | |
| | | | (SEQ | | | |
| | | | ID NO: | | | |
| | | | 2224) | | | |
| rs730882251 | 22 | 42126747 | G | A | CYP2D6 | CYP2D6*62 |
| rs75386357 | 22 | 42127473 | C | T | CYP2D6 | CYP2D6*72 |
| rs763964554 | 22 | 42126896 | G | A | CYP2D6 | CYP2D6*96 |
| rs774671100 | 22 | 42130654 | C | CA | CYP2D6 | CYP2D6*15 |
| rs79292917 | 22 | 42127852 | C | T | CYP2D6 | CYP2D6*59 |
| rs147960066 | 22 | 42127590 | G | A | CYP2D6 | CYP2D6*56 |
| rs730882171 | 22 | 42126747 | G | A | CYP2D6 | CYP2D6*62 |
| rs758320086 | 22 | 42128248 | CAGTT | C | CYP2D6 | CYP2D6*19 |
| . | 22 | 42126666 | C | CAGTG | | CYP2D6*18 |
| | | | | GGCAC | | |
| | | | | (SEQ | | |
| | | | | ID NO: | | |
| | | | | 2225) | | |
| . | 22 | 42126666 | C | CAGTG | | |
| | | | | GGCAC | | |
| | | | | (SEQ | | |
| | | | | ID NO: | | |
| | | | | 2225) | | |
| . | 22 | 42128903 | T | TTA | | CYP2D6*60 |
| . | 22 | 42128903 | T | TTA | | |
| . | 22 | 42128795 | AG | A | | CYP2D6*92 |
| . | 22 | 42128795 | AG | A | | |
| . | 22 | 42126956 | T | G | | CYP2D6*55 |
| . | 22 | 42126956 | T | G | | |
| . | 22 | 42129071 | T | A | CYP2D6 | CYP2D6*50 |
| . | 22 | 42129071 | T | A | | CYP2D6*104 |
| . | 22 | 42129071 | T | A | | |
| rs267607275 | 6 | 18149126 | A | G | TPMT | |
| rs72552738 | 6 | 18139689 | C | T | TPMT | |
| rs74423290 | 6 | 18133884 | G | C | TPMT | |
| rs9333569 | 6 | 18149127 | T | C | TPMT | |
| rs9333570 | 6 | 18133890 | C | T | TPMT | |
| rs113934938 | 10 | 94842995 | G | A | CYP2C19 | CYP2C19*28 |
| rs118203756 | 10 | 94775160 | G | C | CYP2C19 | CYP2C19*23 |
| rs138142612 | 10 | 94842861 | G | A | CYP2C19 | CYP2C19*18 |
| rs145328984 | 10 | 94775106 | C | T | CYP2C19 | CYP2C19*30 |
| rs17879685 | 10 | 94849995 | C | T | CYP2C19 | CYP2C19*13 |
| rs17882687 | 10 | 94762760 | A | C | CYP2C19 | CYP2C19*15 |
| rs367543002 | 10 | 94762712 | C | T | CYP2C19 | CYP2C19*34 |
| rs367543003 | 10 | 94762715 | T | C | CYP2C19 | CYP2C19*34 |
| rs370803989 | 10 | 94780579 | G | A | CYP2C19 | CYP2C19*33 |
| rs55752064 | 10 | 94762755 | T | C | CYP2C19 | CYP2C19*14 |
| rs58973490 | 10 | 94775507 | G | A | CYP2C19 | CYP2C19*2 |
| . | 10 | 94762788 | A | T | | CYP2C19*29 |
| . | 10 | 94762788 | A | T | | |
| . | 10 | 94775121 | C | T | | CYP2C19*31 |
| . | 10 | 94775121 | C | T | | |
| . | 10 | 94775185 | A | G | | CYP2C19*32 |
| . | 10 | 94775185 | A | G | | |
| rs114071557 | 10 | 94938683 | A | G | CYP2C9 | CYP2C9*36 |
| rs1237225311 | 10 | 94972233 | C | T | CYP2C9 | CYP2C9*53 |
| rs12414460 | 10 | 94942231 | G | A | CYP2C9 | CYP2C9*42 |
| rs1250577724 | 10 | 94981302 | C | A | CYP2C9 | CYP2C9*55 |
| rs1274535931 | 10 | 94981230 | C | A | CYP2C9 | CYP2C9*58 |
| rs1326630788 | 10 | 94947917 | T | C | CYP2C9 | CYP2C9*48 |
| rs142240658 | 10 | 94938771 | C | T | CYP2C9 | CYP2C9*21 |
| rs182132442 | 10 | 94972119 | C | A | CYP2C9 | CYP2C9*29 |
| rs199523631 | 10 | 94942254 | C | T | CYP2C9 | CYP2C9*45 |
| rs200183364 | 10 | 94942255 | G | A | CYP2C9 | CYP2C9*33 |
| rs200965026 | 10 | 94942249 | C | T | CYP2C9 | CYP2C9*44 |
| rs202201137 | 10 | 94988925 | A | G | CYP2C9 | CYP2C9*61 |
| rs367826293 | 10 | 94981225 | G | A | CYP2C9 | CYP2C9*34 |
| rs371055887 | 10 | 94941897 | G | C | CYP2C9 | CYP2C9*20 |
| rs56165452 | 10 | 94981297 | T | C | CYP2C9 | CYP2C9*4 |
| rs564813580 | 10 | 94938828 | A | G | CYP2C9 | CYP2C9*37 |
| rs57505750 | 10 | 94981201 | T | C | CYP2C9 | CYP2C9*31 |
| rs67807361 | 10 | 94938737 | C | A | CYP2C9 | CYP2C9*7 |
| rs72558189 | 10 | 94942234 | G | A | CYP2C9 | CYP2C9*14 |
| rs72558189 | 10 | 94942234 | G | A | CYP2C9 | CYP2C9*35 |
| rs72558189 | 10 | 94942234 | G | T | CYP2C9 | CYP2C9*14 |
| rs72558189 | 10 | 94942234 | G | T | CYP2C9 | CYP2C9*35 |
| rs72558192 | 10 | 94972179 | A | G | CYP2C9 | CYP2C9*16 |
| rs72558193 | 10 | 94986073 | A | C | CYP2C9 | CYP2C9*18 |
| rs749060448 | 10 | 94981281 | G | A | CYP2C9 | CYP2C9*24 |
| rs750820937 | 10 | 94981250 | C | A | CYP2C9 | CYP2C9*54 |
| rs754487195 | 10 | 94942305 | G | A | CYP2C9 | CYP2C9*46 |
| rs762239445 | 10 | 94941982 | G | T | CYP2C9 | CYP2C9*39 |
| rs764211126 | 10 | 94986042 | A | G | CYP2C9 | CYP2C9*56 |
| rs767284820 | 10 | 94988955 | T | C | CYP2C9 | CYP2C9*60 |
| rs767576260 | 10 | 94942230 | C | T | CYP2C9 | CYP2C9*43 |
| rs769942899 | 10 | 94988917 | G | C | CYP2C9 | CYP2C9*19 |
| rs774550549 | 10 | 94947785 | C | T | CYP2C9 | CYP2C9*47 |
| rs774607211 | 10 | 94942216 | A | G | CYP2C9 | CYP2C9*41 |
| rs781583846 | 10 | 94988984 | G | A | CYP2C9 | CYP2C9*30 |
| rs868182778 | 10 | 94989023 | G | T | CYP2C9 | CYP2C9*32 |
| rs9332130 | 10 | 94949280 | A | G | CYP2C9 | CYP2C9*10 |
| rs988617574 | 10 | 94972180 | C | G | CYP2C9 | CYP2C9*52 |
| . | 10 | 94981365 | C | T | | CYP2C9*17 |
| . | 10 | 94981365 | C | T | | |
| . | 10 | 94938803 | A | G | | CYP2C9*22 |
| . | 10 | 94938803 | A | G | | |
| . | 10 | 94941915 | G | A | | CYP2C9*23 |
| . | 10 | 94941915 | G | A | | |
| . | 10 | 94942249 | C | G | | CYP2C9*26 |
| . | 10 | 94942249 | C | G | CYP2C9 | CYP2C9*44 |
| . | 10 | 94947938 | A | T | | CYP2C9*28 |
| . | 10 | 94947938 | A | T | | |
| . | 10 | 94941976 | G | C | | CYP2C9*38 |
| . | 10 | 94941976 | G | C | | |
| . | 10 | 94942018 | T | C | | CYP2C9*40 |
| . | 10 | 94942018 | T | C | | |
| . | 10 | 94949129 | A | G | | CYP2C9*49 |
| . | 10 | 94949129 | A | G | | |
| . | 10 | 94949144 | C | T | | CYP2C9*50 |
| . | 10 | 94949144 | C | T | | |
| . | 10 | 94972134 | A | G | | CYP2C9*51 |
| . | 10 | 94972134 | A | G | | |
| . | 10 | 94947907 | A | C | | CYP2C9*57 |
| . | 10 | 94947907 | A | C | | |
| . | 10 | 94988855 | A | T | | CYP2C9*59 |
| . | 10 | 94988855 | A | T | | |
| rs1135829 | 22 | 42127973 | T | C | CYP2D6 | CYP2D6*115 |
| rs141009491 | 22 | 42127631 | C | G | CYP2D6 | CYP2D6*116 |
| rs76088846 | 22 | 42127589 | C | T | CYP2D6 | |
| rs78209835 | 22 | 42127611 | C | T | CYP2D6 | CYP2D6*117 |
| rs1135823 | 22 | 42129174 | C | A | CYP2D6 | CYP2D6*53 |
| rs1135824 | 22 | 42129042 | T | C | CYP2D6 | CYP2D6*3 |
| rs1135828 | 22 | 42128181 | A | T | CYP2D6 | CYP2D6*81 |
| rs118203758 | 22 | 42130667 | C | T | CYP2D6 | CYP2D6*71 |
| rs202102799 | 22 | 42127556 | T | C | CYP2D6 | CYP2D6*108 |
| rs267608293 | 22 | 42127515 | T | A | CYP2D6 | |
| rs267608295 | 22 | 42127593 | G | C | CYP2D6 | CYP2D6*25 |
| rs267608308 | 22 | 42129780 | C | T | CYP2D6 | CYP2D6*73 |
| rs267608310 | 22 | 42129836 | G | A | CYP2D6 | CYP2D6*23 |
| rs28371696 | 22 | 42130715 | C | T | CYP2D6 | CYP2D6*15 |
| rs28371703 | 22 | 42129819 | G | T | CYP2D6 | CYP2D6*4 |
| rs28371704 | 22 | 42129809 | T | C | CYP2D6 | CYP2D6*4 |
| rs28371733 | 22 | 42126914 | C | G | CYP2D6 | CYP2D6*4 |
| rs28371733 | 22 | 42126914 | C | G | CYP2D6 | CYP2D6*52 |
| rs28371733 | 22 | 42126914 | C | T | CYP2D6 | CYP2D6*4 |
| rs28371733 | 22 | 42126914 | C | T | CYP2D6 | CYP2D6*52 |
| rs367543000 | 22 | 42128212 | G | A | CYP2D6 | CYP2D6*81 |
| rs374616348 | 22 | 42129183 | C | T | CYP2D6 | CYP2D6*70 |
| rs375135093 | 22 | 42129113 | A | G | CYP2D6 | CYP2D6*89 |
| rs532668079 | 22 | 42126746 | C | T | CYP2D6 | CYP2D6*75 |
| rs535642512 | 22 | 42129759 | C | T | CYP2D6 | CYP2D6*111 |
| rs568495591 | 22 | 42126605 | G | A | CYP2D6 | CYP2D6*112 |
| rs569229126 | 22 | 42129098 | T | C | CYP2D6 | CYP2D6*90 |
| rs569439709 | 22 | 42126752 | C | T | CYP2D6 | CYP2D6*113 |
| rs61736517 | 22 | 42127565 | T | C | CYP2D6 | CYP2D6*108 |
| rs72549358 | 22 | 42130773 | C | T | CYP2D6 | CYP2D6*28 |
| rs745365204 | 22 | 42128848 | C | T | CYP2D6 | CYP2D6*37 |
| rs74802369 | 22 | 42129771 | T | A | CYP2D6 | CYP2D6*82 |
| rs748712690 | 22 | 42127610 | T | C | CYP2D6 | CYP2D6*94 |
| rs751092905 | 22 | 42126735 | C | T | CYP2D6 | CYP2D6*110 |
| rs76187628 | 22 | 42129779 | A | G | CYP2D6 | CYP2D6*82 |
| rs769157652 | 22 | 42126938 | C | T | CYP2D6 | CYP2D6*27 |
| rs77312092 | 22 | 42127457 | C | T | CYP2D6 | CYP2D6*95 |
| rs773790593 | 22 | 42130778 | G | A | CYP2D6 | CYP2D6*87 |
| rs77913725 | 22 | 42128185 | C | T | CYP2D6 | CYP2D6*81 |
| rs78459009 | 22 | 42129765 | T | C | CYP2D6 | CYP2D6*82 |
| rs78482768 | 22 | 42129087 | G | C | CYP2D6 | CYP2D6*28 |
| rs949717872 | 22 | 42127938 | T | G | CYP2D6 | CYP2D6*24 |
| rs1058172 | 22 | 42127526 | C | G | | |
| rs1058172 | 22 | 42127526 | C | T | | |
| rs267608294 | 22 | 42127523 | A | G | CYP2D6 | CYP2D6*105 |
| rs1555888910 | 22 | 42127523 | A | G | CYP2D6 | CYP2D6*105 |
| rs201830078 | 22 | 42128181 | A | T | | |
| rs201830078 | 22 | 42128181 | A | G | | |
| rs774943042 | 22 | 42129056 | C | A | CYP2D6 | |
| rs149157808 | 22 | 42126914 | C | T | CYP2D6 | CYP2D6*4 |
| rs149157808 | 22 | 42126914 | C | T | CYP2D6 | CYP2D6*52 |
| rs149157808 | 22 | 42126914 | C | T | | |
| rs376436494 | 22 | 42127593 | G | A | CYP2D6 | CYP2D6*25 |
| rs376436494 | 22 | 42127593 | G | C | CYP2D6 | CYP2D6*25 |
| rs376436494 | 22 | 42127593 | G | T | CYP2D6 | CYP2D6*25 |
| rs548942748 | 22 | 42128185 | C | T | CYP2D6 | CYP2D6*81 |
| . | 22 | 42127899 | T | C | | CYP2D6*118 |
| . | 22 | 42127514 | A | G | | CYP2D6*26 |
| . | 22 | 42126634 | A | C | | CYP2D6*85 |
| . | 22 | 42126634 | A | C | | |
| . | 22 | 42129056 | C | G | | CYP2D6*91 |
| . | 22 | 42129056 | C | G | CYP2D6 | |
| . | 22 | 42129056 | C | G | | |
| . | 22 | 42128272 | T | G | | CYP2D6*93 |
| . | 22 | 42128272 | T | G | | |
| . | 22 | 42126697 | G | T | | CYP2D6*97 |
| . | 22 | 42126697 | G | T | | |
| . | 22 | 42126681 | G | C | | CYP2D6*98 |
| . | 22 | 42126681 | G | C | | |
| . | 22 | 42129071 | T | A | CYP2D6 | CYP2D6*50 |
| . | 22 | 42129071 | T | A | | CYP2D6*104 |
| . | 22 | 42129071 | T | A | | |
| rs1135825 | 22 | 42129037 | G | T | | |
| rs1135826 | 22 | 42129036 | A | C | | |
| rs61745683 | 22 | 42127512 | C | T | | |
| rs1406719554 | 22 | 42127922 | A | G | | |
| rs369177208 | 22 | 42126719 | C | T | | |
| rs781457579 | 22 | 42129134 | G | A | | |
| rs17002853 | 22 | 42128325 | A | G | | |
| rs747089665 | 22 | 42126926 | G | A | | |
| rs3021084 | 22 | 42126877 | G | A | | |
| . | 22 | 42130727 | AG | A | | |
| . | 22 | 42126981 | G | GGA | | |
| . | 22 | 42129887 | A | G | | |
| . | 22 | 42129155 | C | T | | |
| . | 22 | 42128879 | A | G | | |
| . | 22 | 42128878 | C | A | | |
| . | 22 | 42127602 | C | T | | |
| . | 22 | 42126578 | C | T | | |
| . | 22 | 42126647 | C | T | | |
| rs28365083 | 7 | 99652613 | G | T | CYP3A5, | |
| | | | | | ZSCAN25 | |
| rs28383479 | 7 | 99660516 | C | T | CYP3A5, | |
| | | | | | ZSCAN25 | |
| rs55817950 | 7 | 99676198 | G | A | CYP3A5, | |
| | | | | | ZSCAN25 | |
| rs55965422 | 7 | 99666950 | A | T | CYP3A5, | |
| | | | | | ZSCAN25 | |
| rs55965422 | 7 | 99666950 | A | G | CYP3A5, | |
| | | | | | ZSCAN25 | |
| rs56411402 | 7 | 99665237 | T | C | CYP3A5, | |
| | | | | | ZSCAN25 | |

TABLE 9
PGx Probe Sequences

| | | SEQ | | SEQ | | | |
|---|---|---|---|---|---|---|---|
| | | ID | | ID | | | Ref |
| ID | AlleleA_ProbeSeq | NO: | AlleleB_ProbeSeq | NO: | Chr | Map Info | Strand |
| rs6025 | TTCTCAGAATTTCTG | 22 | | | 1 | 169549811 | + |
| | AAAGGTTACTTCAAG | | | | | | |
| | GACAAAATACCTGTA | | | | | | |
| | TTCCT | | | | | | |
| rs6025 | TTCTCAGAATTTCTG | 23 | | | 1 | 169549811 | + |
| | AAAGGTTACTTCAAG | | | | | | |
| | GACAAAATACCTGTA | | | | | | |
| | TTCCT | | | | | | |
| rs6025 | TTCTCAGAATTTCTG | 24 | | | 1 | 169549811 | + |
| | AAAGGTTACTTCAAG | | | | | | |
| | GACAAAATACCTGTA | | | | | | |
| | TTCCT | | | | | | |
| rs18005 | GAGGGAGGGGCCTCT | 25 | GAGGGAGGGGCCTCT | 1664 | 1 | 201060815 | − |
| 59 | TGGTGCTGACCTGTC | | TGGTGCTGACCTGTC | | | | |
| | CTGTTGTATGTGTCA | | CTGTTGTATGTGTCA | | | | |
| | CAGCA | | CAGCG | | | | |
| rs18005 | GAGGGAGGGGCCTCT | 26 | GAGGGAGGGGCCTCT | 1665 | 1 | 201060815 | − |
| 59 | TGGTGCTGACCTGTC | | TGGTGCTGACCTGTC | | | | |
| | CTGTTGTATGTGTCA | | CTGTTGTATGTGTCA | | | | |
| | CAGCA | | CAGCG | | | | |
| rs18005 | GAGGGAGGGGCCTCT | 27 | GAGGGAGGGGCCTCT | 1666 | 1 | 201060815 | − |
| 59 | TGGTGCTGACCTGTC | | TGGTGCTGACCTGTC | | | | |
| | CTGTTGTATGTGTCA | | CTGTTGTATGTGTCA | | | | |
| | CAGCA | | CAGCG | | | | |
| rs77222 | AAGGGGTCTGCAGGG | 28 | | | 1 | 201091993 | + |
| 6819 | ACACTGCCACCCACT | | | | | | |
| | AGGCACCCCCGACAC | | | | | | |
| | CAGCC | | | | | | |
| rs77222 | CCGGCTTGGATGTCA | 29 | | | 1 | 201091993 | − |
| 6819 | AGGCCCTCAGAGCCT | | | | | | |
| | TCCGAGTGCTCAGAC | | | | | | |
| | CCCTC | | | | | | |
| rs77222 | CCGGCTTGGATGTCA | 30 | | | 1 | 201091993 | − |
| 6819 | AGGCCCTCAGAGCCT | | | | | | |
| | TCCGAGTGCTCAGAC | | | | | | |
| | CCCTC | | | | | | |
| rs67376 | ATCATTACAGGTCAT | 31 | ATCATTACAGGTCAT | 1667 | 1 | 97082391 | + |
| 798 | GTAGCATTTACCACA | | GTAGCATTTACCACA | | | | |
| | GTTGATACACATTTC | | GTTGATACACATTTC | | | | |
| | TTCAA | | TTCAT | | | | |
| rs67376 | GGAACATTTGGTGAA | 32 | GGAACATTTGGTGAA | 1668 | 1 | 97082391 | − |
| 798 | TTGAGCAACGTAGAG | | TTGAGCAACGTAGAG | | | | |
| | CAAGTIGTGGCTATG | | CAAGTIGTGGCTATG | | | | |
| | ATTGT | | ATTGA | | | | |
| rs39182 | ATATTGGTGTCAAAG | 33 | ATATTGGTGTCAAAG | 1669 | 1 | 97450058 | − |
| 90 | TGTCACTGAACTAAA | | TGTCACTGAACTAAA | | | | |
| | GGCTGACTTTCCAGA | | GGCTGACTTTCCAGA | | | | |
| | CAACA | | CAACG | | | | |
| rs39182 | TTCACCAACTTATGC | 34 | TTCACCAACTTATGC | 1670 | 1 | 97450058 | + |
| 90 | CAATTCTCTTGTTTT | | CAATTCTCTTGTTTT | | | | |
| | AGATGTTAAATCACA | | AGATGTTAAATCACA | | | | |
| | CTTAT | | CTTAC | | | | |
| rs39182 | ATTCACCAACTTATG | 35 | | | 1 | 97450058 | + |
| 90 | CCAATTCTCTTGTTT | | | | | | |
| | TAGATGTTAAATCAC | | | | | | |
| | ACTTA | | | | | | |
| rs55886 | GAAAGTTTTGGTGAG | 36 | GAAAGTTTTGGTGAG | 1671 | 1 | 97515787 | + |
| 062 | GGCAAAACCCCATCC | | GGCAAAACCCCATCC | | | | |
| | AGCTTCAAAAGCTCT | | AGCTTCAAAAGCTCT | | | | |
| | TCGAA | | TCGAC | | | | |
| rs55886 | GAAAGTTTTGGTGAG | 37 | GAAAGTTTTGGTGAG | 1672 | 1 | 97515787 | + |
| 062 | GGCAAAACCCCATCC | | GGCAAAACCCCATCC | | | | |
| | AGCTTCAAAAGCTCT | | AGCTTCAAAAGCTCT | | | | |
| | TCGAA | | TCGAC | | | | |
| rs55886 | AATCCTTTTGGTCTT | 38 | AATCCTTTTGGTCTT | 1673 | 1 | 97515787 | − |
| 062 | GCTAGCGCAACTCCA | | GCTAGCGCAACTCCA | | | | |
| | GCCACCAGCACATCA | | GCCACCAGCACATCA | | | | |
| | ATGAT | | ATGAG | | | | |
| rs67376 | GGAACATTTGGTGAA | 39 | GGAACATTTGGTGAA | 1674 | 1 | 97547947 | − |
| 798 | TTGAGCAACGTAGAG | | TTGAGCAACGTAGAG | | | | |
| | CAAGTTGTGGCTATG | | CAAGTTGTGGCTATG | | | | |
| | ATTGT | | ATTGA | | | | |
| rs56038 | GTTATAGTAAAAGGT | 40 | | | 1 | 97573863 | − |
| 477 | GGGAGAATTGTTGCT | | | | | | |
| | ATGCAGTTTGTTCGG | | | | | | |
| | ACAGA | | | | | | |
| rs56038 | GTTATAGTAAAAGGT | 41 | | | 1 | 97573863 | − |
| 477 | GGGAGAATTGTTGCT | | | | | | |
| | ATGCAGTTTGTTCGG | | | | | | |
| | ACAGA | | | | | | |
| rs56038 | GTTATAGTAAAAGGT | 42 | | | 1 | 98039419 | − |
| 477 | GGGAGAATTGTTGCT | | | | | | |
| | ATGCAGTTTGTTCGG | | | | | | |
| | ACAGA | | | | | | |
| rs12248 | GTTTTAGCAAACGAT | 43 | | | 10 | 94761900 | + |
| 560 | TTTTTTTTTCAAATT | | | | | | |
| | TGTGTCTTCTGTTCT | | | | | | |
| | CAAAG | | | | | | |
| rs12248 | GTTTTAGCAAACGAT | 44 | | | 10 | 94761900 | + |
| 560 | TTTTTTTTTCAAATT | | | | | | |
| | TGTGTCTTCTGTTCT | | | | | | |
| | CAAAG | | | | | | |
| rs12248 | GTTTTAGCAAACGAT | 45 | | | 10 | 94761900 | + |
| 560 | TTTTTTTTTCAAATT | | | | | | |
| | TGTGTCTTCTGTTCT | | | | | | |
| | CAAAG | | | | | | |
| rs28399 | AAGGAGAAGCAAACA | 46 | | | 10 | 94762706 | − |
| 504 | TGAGAGACAGAGCAC | | | | | | |
| | AAGGACCACAAAAGG | | | | | | |
| | ATCCA | | | | | | |
| rs28399 | AAGGAGAAGCAAACA | 47 | | | 10 | 94762706 | − |
| 504 | TGAGAGACAGAGCAC | | | | | | |
| | AAGGACCACAAAAGG | | | | | | |
| | ATCCA | | | | | | |
| rs28399 | AAGGAGAAGCAAACA | 48 | | | 10 | 94762706 | − |
| 504 | TGAGAGACAGAGCAC | | | | | | |
| | AAGGACCACAAAAGG | | | | | | |
| | ATCCA | | | | | | |
| rs55752 | TGGGGCCAGGAGGGA | 49 | | | 10 | 94762755 | |
| 064 | GTTTTCCTCTCCCAG | | | | | | |
| | AGCTCTGTCTCCAGA | | | | | | |
| | TTGAA | | | | | | |
| rs55752 | TGGGGCCAGGAGGGA | 50 | | | 10 | 94762755 | − |
| 064 | GTTTTCCTCTCCCAG | | | | | | |
| | AGCTCTGTCTCCAGA | | | | | | |
| | TTGAA | | | | | | |
| rs55752 | TAGGGCCAGGAGGGA | 51 | | | 10 | 94762755 | − |
| 064 | GTTTTCCTCTCCCAG | | | | | | |
| | AGCTCTGTCTCCAGA | | | | | | |
| | TTGAA | | | | | | |
| 10_ | TCATGTTTGCTTCTC | 52 | TCATGTTTGCTTCTC | 1675 | 10 | 94762788 | + |
| 94762788 | CTTTCAATCTGGAGA | | CTTTCAATCTGGAGA | | | | |
| | CAGAGCTCTGGGAGA | | CAGAGCTCTGGGAGA | | | | |
| | GGAAA | | GGAAT | | | | |
| 10_ | TCATGTTTGCTTCTC | 53 | TCATGTTTGCTTCTC | 1676 | 10 | 94762788 | + |
| 94762788 | CTTTCAATCTGGAGA | | CTTTCAATCTGGAGA | | | | |
| | CAGAGCTCTGGGAGA | | CAGAGCTCTGGGAGA | | | | |
| | GGAAA | | GGAAT | | | | |
| 10_ | TCATGTTTGCTTCTC | 54 | TCATGTTTGCTTCTC | 1677 | 10 | 94762788 | + |
| 94762788 | CTTTCAATCTGGAGA | | CTTTCAATCTGGAGA | | | | |
| | CAGAGCTCTGGGAGA | | CAGAGCTCTGGGAGA | | | | |
| | GGAAA | | GGAAT | | | | |
| rs14532 | AGCTCTCAAAAATCT | 55 | | | 10 | 94775106 | + |
| 8984 | ATGGCCCTGTGTTCA | | | | | | |
| | CTCTGTATTTTGGCC | | | | | | |
| | TGGAA | | | | | | |
| rs14532 | AGCTCTCAAAAATCT | 56 | | | 10 | 94775106 | + |
| 8984 | ATGGCCCTGTGTTCA | | | | | | |
| | CTCTGTATTTTGGCC | | | | | | |
| | TGGAA | | | | | | |
| rs14532 | ATCAATCAGGGCTTC | 57 | | | 10 | 94775106 | − |
| 8984 | CTTCACCACTTCATA | | | | | | |
| | TCCATGCAGCACCAC | | | | | | |
| | CATGC | | | | | | |
| 10_ | ATGGCCCTGTGTTCA | 58 | | | 10 | 94775121 | + |
| 94775121 | CTCTGTATTTTGGCC | | | | | | |
| | TGGAACGCATGGTGG | | | | | | |
| | TGCTG | | | | | | |
| 10_ | ATGGCCCTGTGTTCA | 59 | | | 10 | 94775121 | + |
| 94775121 | CTCTGTATTTTGGCC | | | | | | |
| | TGGAACGCATGGTGG | | | | | | |
| | TGCTG | | | | | | |
| 10_ | ATGGCCCTGTGTTCA | 60 | | | 10 | 94775121 | + |
| 94775121 | CTCTGTATTTTGGCC | | | | | | |
| | TGGAACGCATGGTGG | | | | | | |
| | TGCTG | | | | | | |
| rs11820 | GGTGGTGCTGCATGG | 61 | GGTGGTGCTGCATGG | 1678 | 10 | 94775160 | + |
| 3756 | ATATGAAGTGGTGAA | | ATATGAAGTGGTGAA | | | | |
| | GGAAGCCCTGATTGA | | GGAAGCCCTGATTGA | | | | |
| | TCTTG | | TCTTC | | | | |
| rs11820 | GGTGGTGCTGCATGG | 62 | GGTGGTGCTGCATGG | 1679 | 10 | 94775160 | + |
| 3756 | ATATGAAGTGGTGAA | | ATATGAAGTGGTGAA | | | | |
| | GGAAGCCCTGATTGA | | GGAAGCCCTGATTGA | | | | |
| | TCTTG | | TCTTC | | | | |
| rs11820 | TTAGCTCTTTCAGCC | 63 | TTAGCTCTTTCAGCC | 1680 | 10 | 94775160 | − |
| 3756 | AGTGGGAAATGGCCT | | AGTGGGAAATGGCCT | | | | |
| | CTTCCAGAAAACTCC | | CTTCCAGAAAACTCC | | | | |
| | TCTCC | | TCTCG | | | | |
| 10_ | GGTGAAGGAAGCCCT | 64 | | | 10 | 94775185 | + |
| 94775185 | GATTGATCTTGGAGA | | | | | | |
| | GGAGTTTTCTGGAAG | | | | | | |
| | AGGCC | | | | | | |
| 10_ | GGTGAAGGAAGCCCT | 65 | | | 10 | 94775185 | + |
| 94775185 | GATTGATCTTGGAGA | | | | | | |
| | GGAGTTTTCTGGAAG | | | | | | |
| | AGGCC | | | | | | |
| 10_ | GGTGAAGGAAGCCCT | 66 | | | 10 | 94775185 | + |
| 94775185 | GATTGATCTTGGAGA | | | | | | |
| | GGAGTTTTCTGGAAG | | | | | | |
| | AGGCC | | | | | | |
| 10_ | CACTTGCACACCTAC | 67 | | | 10 | 94775185 | − |
| 94775185 | CAAATCCTCTGTTAG | | | | | | |
| | CTCTTTCAGCCAGTG | | | | | | |
| | GGAAA | | | | | | |
| rs12769 | CATCTCTTTCCATTG | 68 | | | 10 | 94775367 | − |
| 205 | CTGAAAACGATTCCT | | | | | | |
| | AACAGGAAGAGAAAC | | | | | | |
| | GAAAC | | | | | | |
| rs12769 | CATCTCTTTCCATTG | 69 | | | 10 | 94775367 | − |
| 205 | CTGAAAACGATTCCT | | | | | | |
| | AACAGGAAGAGAAAC | | | | | | |
| | GAAAC | | | | | | |
| rs41291 | CATCCCAAAATTCCG | 70 | | | 10 | 94775416 | − |
| 556 | CAGCGTCATGAGGGA | | | | | | |
| | GAAACGCCGGATCTC | | | | | | |
| | CTTCC | | | | | | |
| rs41291 | TAGTTTCGTTTCTCT | 71 | | | 10 | 94775416 | + |
| 556 | TCCTGTTAGGAATCR | | | | | | |
| | TTTTCAGCAATGGAA | | | | | | |
| | AGAGA | | | | | | |
| rs41291 | TAGTTTCGTTTCTCT | 72 | | | 10 | 94775416 | + |
| 556 | TCCTGTTAGGAATCR | | | | | | |
| | TTTTCAGCAATGGAA | | | | | | |
| | AGAGA | | | | | | |
| rs72552 | CAATGGAAAGAGATG | 73 | | | 10 | 94775453 | + |
| 267 | GAAGGAGATCCGGCG | | | | | | |
| | TTTCTCCCTCATGAC | | | | | | |
| | GCTGC | | | | | | |
| rs72552 | CTTCCTCTTGAACAC | 74 | | | 10 | 94775453 | − |
| 267 | GGTCCTCAATGCTCC | | | | | | |
| | TCTTCCCCWTCCCAA | | | | | | |
| | AATTC | | | | | | |
| rs72552 | CTTCCTCTTGAACAC | 75 | | | 10 | 94775453 | − |
| 267 | GGTCCTCAATGCTCC | | | | | | |
| | TCTTCCCCATCCCAA | | | | | | |
| | AATTC | | | | | | |
| rs72552 | CTTCCTCTTGAACAC | 76 | | | 10 | 94775453 | − |
| 267 | GGTCCTCAATGCTCC | | | | | | |
| | TCTTCCCCATCCCAA | | | | | | |
| | AATTC | | | | | | |
| rs17884 | CCTCATGACgCTGCG | 77 | | | 10 | 94775489 | + |
| 712 | GAATaTTGGGATGaG | | | | | | |
| | GAAGAGGAGCATtGA | | | | | | |
| | GGACC | | | | | | |
| rs17884 | CAGaAAGGTCAGTGA | 78 | | | 10 | 94775489 | − |
| 712 | TAgaGAGTAtGtTCC | | | | | | |
| | AGCGGGCTTCCTCTT | | | | | | |
| | GAACA | | | | | | |
| rs17884 | CAGaAAGGTCAGTGA | 79 | | | 10 | 94775489 | − |
| 712 | TAgaGAGTAtGtTCC | | | | | | |
| | AGCGGGCTTCCTCTT | | | | | | |
| | GAACA | | | | | | |
| rs58973 | TTTTGGGATGGGGAA | 80 | | | 10 | 94775507 | + |
| 490 | GAGGAGCATTGAGGA | | | | | | |
| | CCGTGTTCAAGAGGA | | | | | | |
| | AGCCC | | | | | | |
| rs58973 | TTTTGGGATGGGGAA | 81 | | | 10 | 94775507 | + |
| 490 | GAGGAGCATTGAGGA | | | | | | |
| | CCGTGTTCAAGAGGA | | | | | | |
| | AGCCC | | | | | | |
| rs58973 | TTTTGGGATGGGGAA | 82 | | | 10 | 94775507 | + |
| 490 | GAGGAGCATTGAGGA | | | | | | |
| | CCGTGTTCAAGAGGA | | | | | | |
| | AGCCC | | | | | | |
| rs37080 | GTTTTCATTCAATTT | 83 | | | 10 | 94780579 | − |
| 3989 | TTCCATCAAGTTAAG | | | | | | |
| | AAATTGCTGATCTTT | | | | | | |
| | ATAAT | | | | | | |
| rs37080 | GTTTTCATTCAATTT | 84 | | | 10 | 94780579 | − |
| 3989 | TTCCATCAAGTTAAG | | | | | | |
| | AAATTGCTGATCTTT | | | | | | |
| | ATAAT | | | | | | |
| rs37080 | GTTTTCATTCAATTT | 85 | | | 10 | 94780579 | − |
| 3989 | TTCCATCAAGTTAAG | | | | | | |
| | AAATTGCTGATCTTT | | | | | | |
| | ATAAT | | | | | | |
| rs49868 | AACTTGATGGAAAAA | 86 | | | 10 | 94780653 | + |
| 93 | TTGAATGAAAACATC | | | | | | |
| | AGGATTGTAAGCACC | | | | | | |
| | CCCTG | | | | | | |
| rs49868 | AACTTGATGGAAAAA | 87 | | | 10 | 94780653 | + |
| 93 | TTGAATGAAAACATC | | | | | | |
| | AGGATTGTAAGCACC | | | | | | |
| | CCCTG | | | | | | |
| rs49868 | AACTTGATGGAAAAA | 88 | | | 10 | 94780653 | + |
| 93 | TTGAATGAAAACATC | | | | | | |
| | AGGATTGTAAGCACC | | | | | | |
| | CCCTG | | | | | | |
| rs64134 | TGTTTTCTCTTAGAT | 89 | | | 10 | 94781858 | + |
| 38 | ATGCAATAATTTTCC | | | | | | |
| | CACTATCATTGATTA | | | | | | |
| | TTTCC | | | | | | |
| rs64134 | TATCACTTTCCATAA | 90 | | | 10 | 94781858 | − |
| 38 | AAGCAAGGTTTTTAA | | | | | | |
| | GTAATTTGTTATGGG | | | | | | |
| | TTCCY | | | | | | |
| rs64134 | TGTTTTCTCTTAGAT | 91 | | | 10 | 94781858 | + |
| 38 | ATGCAATAATTTTCC | | | | | | |
| | CACTATCATTGATTA | | | | | | |
| | TTTCC | | | | | | |
| rs42442 | ATATCACTTTCCATA | 92 | | | 10 | 94781859 | − |
| 85 | AAAGCAAGGTTTTTA | | | | | | |
| | AGTAATTTGTTATGG | | | | | | |
| | GTTCC | | | | | | |
| rs42442 | ATATCACTTTCCATA | 93 | | | 10 | 94781859 | − |
| 85 | AAAGCAAGGTTTTTA | | | | | | |
| | AGTAATTTGTTATGG | | | | | | |
| | GTTCC | | | | | | |
| rs42442 | ATATCACTTTCCATA | 94 | | | 10 | 94781859 | − |
| 85 | AAAGCAAGGTTTTTA | | | | | | |
| | AGTAATTTGTTATGG | | | | | | |
| | GTTCC | | | | | | |
| rs72558 | AACAACCCTCGGGAC | 95 | AACAACCCTCGGGAC | 1681 | 10 | 94781999 | + |
| 186 | TTTATTGATTGCTTC | | TTTATTGATTGCTTC | | | | |
| | CTGATCAAAATGGAG | | CTGATCAAAATGGAG | | | | |
| | AAGGA | | AAGGT | | | | |
| rs72558 | AACAACCCTCGGGAC | 96 | AACAACCCTCGGGAC | 1682 | 10 | 94781999 | + |
| 186 | TTTATTGATTGCTTC | | TTTATTGATTGCTTC | | | | |
| | CTGATCAAAATGGAG | | CTGATCAAAATGGAG | | | | |
| | AAGGA | | AAGGT | | | | |
| rs72558 | CAACAACCCTCGGGA | 97 | | | 10 | 94781999 | + |
| 186 | CTTTATTGATTGCTT | | | | | | |
| | CCTGATCAAAATGGA | | | | | | |
| | GAAGG | | | | | | |
| rs13814 | ATCAGTTCTTACTTG | 98 | | | 10 | 94842861 | + |
| 2612 | TGTCTTGTCAGCTAA | | | | | | |
| | AGTCCAGGAAGAGAT | | | | | | |
| | TGAAC | | | | | | |
| rs37585 | TCTTACTTGTGTCTT | 99 | TCTTACTTGTGTCTT | 1683 | 10 | 94842866 | + |
| 81 | GTCAGCTAAAGTCCA | | GTCAGCTAAAGTCCA | | | | |
| | GGAAGAGATTGAACG | | GGAAGAGATTGAACG | | | | |
| | TGTYA | | TGTYG | | | | |
| rs37585 | TCTTACTTGTGTCTT | 100 | TCTTACTTGTGTCTT | 1684 | 10 | 94842866 | + |
| 81 | GTCAGCTAAAGTCCA | | GTCAGCTAAAGTCCA | | | | |
| | GGAAGAGATTGAACG | | GGAAGAGATTGAACG | | | | |
| | TGTYA | | TGTYG | | | | |
| rs37585 | TTCTTACTTGTGTCT | 101 | | | 10 | 94842866 | + |
| 81 | TGTCAGCTAAAGTCC | | | | | | |
| | AGGAAGAGATTGAAC | | | | | | |
| | GTGTY | | | | | | |
| rs11393 | GATACATCGACCTCA | 102 | | | 10 | 94842995 | + |
| 4938 | TCCCCACCAGCCTGC | | | | | | |
| | CCCATGCAGTGACCT | | | | | | |
| | GTGAC | | | | | | |
| rs11393 | GATACATCGACCTCA | 103 | | | 10 | 94842995 | + |
| 4938 | TCCCCACCAGCCTGC | | | | | | |
| | CCCATGCAGTGACCT | | | | | | |
| | GTGAC | | | | | | |
| rs56337 | AGTTACACATGAGGA | 104 | | | 10 | 94852738 | + |
| 013 | GTAACTTCTCCCTAT | | | | | | |
| | GTTTGTTATTTTCAG | | | | | | |
| | GAAAA | | | | | | |
| rs93320 | TACTGATAGTGTACA | 105 | | | 10 | 94936917 | − |
| 94 | ATGATTCAGGATTTC | | | | | | |
| | GTAATTCAGTCTAGT | | | | | | |
| | AAATT | | | | | | |
| rs11407 | AAGGAGAAGCAAACA | 106 | | | 10 | 94938683 | − |
| 1557 | TGAGAGACAGAGCAC | | | | | | |
| | AAGGACCACAAGAGA | | | | | | |
| | ATCCA | | | | | | |
| rs11407 | AAGGAGAAGCAAACA | 107 | | | 10 | 94938683 | − |
| 1557 | TGAGAGACAGAGCAC | | | | | | |
| | AAGGACCACAAGAGA | | | | | | |
| | ATCCA | | | | | | |
| rs11407 | AAGGAGAAGCAAACA | 108 | | | 10 | 94938683 | − |
| 1557 | TGAGAGACAGAGCAC | | | | | | |
| | AAGGACCACAAGAGA | | | | | | |
| | ATCCA | | | | | | |
| rs67807 | AGGAGTGGGGCCAGG | 109 | | | 10 | 94938737 | − |
| 361 | AGGGAGTTTTCCTCT | | | | | | |
| | CCCAGAGCTCTGTCT | | | | | | |
| | CCAGA | | | | | | |
| rs67807 | AGGAGTGGGGCCAGG | 110 | | | 10 | 94938737 | − |
| 361 | AGGGAGTTTTCCTCT | | | | | | |
| | CCCAGAGCTCTGTCT | | | | | | |
| | CCAGA | | | | | | |
| rs67807 | AGGAGTGGGGCCAGG | 111 | | | 10 | 94938737 | − |
| 361 | AGGGAGTTTTCCTCT | | | | | | |
| | CCCAGAGCTCTGTCT | | | | | | |
| | CCAGA | | | | | | |
| rs14224 | TTTGCTTCTCCTTTC | 112 | | | 10 | 94938771 | + |
| 0658 | ACTCTGGAGACAGAG | | | | | | |
| | CTCTGGGAGAGGAAA | | | | | | |
| | ACTCC | | | | | | |
| rs14224 | TTTGCTTCTCCTTTC | 113 | | | 10 | 94938771 | + |
| 0658 | ACTCTGGAGACAGAG | | | | | | |
| | CTCTGGGAGAGGAAA | | | | | | |
| | ACTCC | | | | | | |
| rs14224 | TACCTATCTGTAGGA | 114 | | | 10 | 94938771 | − |
| 0658 | TATTTCCAATCACTG | | | | | | |
| | GGAGAGGAGTGGGGC | | | | | | |
| | CAGGA | | | | | | |
| 10_ | TACATTGGTTAAGGA | 115 | | | 10 | 94938803 | − |
| 94938803 | TTTGCTGATGTCCTT | | | | | | |
| | AATACCTATCTGTAG | | | | | | |
| | GATAT | | | | | | |
| 10_ | TACATTGGTTAAGGA | 116 | | | 10 | 94938803 | − |
| 94938803 | TTTGCTGATGTCCTT | | | | | | |
| | AATACCTATCTGTAG | | | | | | |
| | GATAT | | | | | | |
| 10_ | TACATTGGTTAAGGA | 117 | | | 10 | 94938803 | − |
| 94938803 | TTTGCTGATGTCCTT | | | | | | |
| | AATACCTATCTGTAG | | | | | | |
| | GATAT | | | | | | |
| 10_ | TACATTGGTTAAGGA | 118 | | | 10 | 94938803 | − |
| 94938803 | TTTGCTGATGTCCTT | | | | | | |
| | AATACCTATCTGTAG | | | | | | |
| | GATAT | | | | | | |
| rs56481 | TTGCAAGCCACTGAA | 119 | | | 10 | 94938828 | − |
| 3580 | GGAGCATACTTACAT | | | | | | |
| | TGGTTAAGGATTTGC | | | | | | |
| | TGATG | | | | | | |
| rs56481 | TTGCAAGCCACTGAA | 120 | | | 10 | 94938828 | − |
| 3580 | GGAGCATACTTACAT | | | | | | |
| | TGGTTAAGGATTTGC | | | | | | |
| | TGATG | | | | | | |
| rs56481 | TTGCAAGCCACTGAA | 121 | | | 10 | 94938828 | − |
| 3580 | GGAGCATACTTACAT | | | | | | |
| | TGGTTAAGGATTTGC | | | | | | |
| | TGATG | | | | | | |
| rs37105 | GCTTCCTTCACTGCT | 122 | GCTTCCTTCACTGCT | 1685 | 10 | 94941897 | − |
| 5887 | TCATATCCATGCAGC | | TCATATCCATGCAGC | | | | |
| | ACCACTATGGGTTTC | | ACCACTATGGGTTTC | | | | |
| | AGGCC | | AGGCG | | | | |
| rs37105 | GCTTCCTTCACTGCT | 123 | GCTTCCTTCACTGCT | 1686 | 10 | 94941897 | − |
| 5887 | TCATATCCATGCAGY | | TCATATCCATGCAGY | | | | |
| | AYCACTATGGGTTTC | | AYCACTATGGGTTTC | | | | |
| | AGGCC | | AGGCG | | | | |
| rs37105 | GCTTCCTTCACTGCT | 124 | GCTTCCTTCACTGCT | 1687 | 10 | 94941897 | − |
| 5887 | TCATATCCATGCAGY | | TCATATCCATGCAGY | | | | |
| | AYCACTATGGGTTTC | | AYCACTATGGGTTTC | | | | |
| | AGGCC | | AGGCG | | | | |
| 10_ | CTCTCCAAGATCAAT | 125 | | | 10 | 94941915 | − |
| 94941915 | CAGGGCTTCCTTCAC | | | | | | |
| | TGCTTCATATCCATG | | | | | | |
| | CAGYA | | | | | | |
| 10_ | TCTCCAAGATCAATC | 126 | TCTCCAAGATCAATC | 1688 | 10 | 94941915 | − |
| 94941915 | AGGGCTTCCTTCACT | | AGGGCTTCCTTCACT | | | | |
| | GCTTCATATCCATGC | | GCTTCATATCCATGC | | | | |
| | AGCAT | | AGCAC | | | | |
| 10_ | TCTCCAAGATCAATC | 127 | TCTCCAAGATCAATC | 1689 | 10 | 94941915 | − |
| 94941915 | AGGGCTTCCTTCACT | | AGGGCTTCCTTCACT | | | | |
| | GCTTCATATCCATGC | | GCTTCATATCCATGC | | | | |
| | AGYAT | | AGYAC | | | | |
| rs72558 | TAGCTCTTTCAGCCA | 128 | | | 10 | 94941958 | − |
| 187 | GTGGGAAAATGCCTC | | | | | | |
| | TTCCAGAAAACTCCT | | | | | | |
| | CTCCA | | | | | | |
| rs72558 | CATaGTGGTGCTGCA | 129 | | | 10 | 94941958 | + |
| 187 | TCGATATGAAGcaGT | | | | | | |
| | GACGGAAGgCCTGAT | | | | | | |
| | TGATC | | | | | | |
| rs72558 | CATaGTGGTGCTGCA | 130 | | | 10 | 94941958 | + |
| 187 | TCGATATGAAGcaGT | | | | | | |
| | GAcGGAAGgCCTGAT | | | | | | |
| | TGATC | | | | | | |
| 10_ | CCTACCAAATCCTCT | 131 | CCTACCAAATCCTCT | 1690 | 10 | 94941976 | − |
| 94941976 | GTTAGCTCTTTCAGC | | GTTAGCTCTTTCAGC | | | | |
| | CAGTGGGAAAATGMC | | CAGTGGGAAAATGMC | | | | |
| | TCTTG | | TCTTC | | | | |
| 10_ | CCTACCAAATCCTCT | 132 | CCTACCAAATCCTCT | 1691 | 10 | 94941976 | − |
| 94941976 | GTTAGCTCTTTCAGC | | GTTAGCTCTTTCAGC | | | | |
| | CAGTGGGAAAATGMC | | CAGTGGGAAAATGMC | | | | |
| | TCTTG | | TCTTC | | | | |
| 10_ | CCTACCAAATCCTCT | 133 | CCTACCAAATCCTCT | 1692 | 10 | 94941976 | − |
| 94941976 | GTTAGCTCTTTCAGC | | GTTAGCTCTTTCAGC | | | | |
| | CAGTGGGAAAATGCC | | CAGTGGGAAAATGCC | | | | |
| | TCTTG | | TCTTC | | | | |
| rs76223 | TGCACACCTACCAAA | 134 | TGCACACCTACCAAA | 1693 | 10 | 94941982 | − |
| 9445 | TCCTCTGTTAGCTCT | | TCCTCTGTTAGCTCT | | | | |
| | TTCAGCCAGTGGGAA | | TTCAGCCAGTGGGAA | | | | |
| | AATGT | | AATGC | | | | |
| rs76223 | TGCACACCTACCAAA | 135 | TGCACACCTACCAAA | 1694 | 10 | 94941982 | − |
| 9445 | TCCTCTGTTAGCTCT | | TCCTCTGTTAGCTCT | | | | |
| | TTCAGCCAGTGGGAA | | TTCAGCCAGTGGGAA | | | | |
| | AATGA | | AATGC | | | | |
| rs76223 | TGCACACCTACCAAA | 136 | TGCACACCTACCAAA | 1695 | 10 | 94941982 | − |
| 9445 | TCCTCTGTTAGCTCT | | TCCTCTGTTAGCTCT | | | | |
| | TTCAGCCAGTGGGAA | | TTCAGCCAGTGGGAA | | | | |
| | AATGA | | AATGC | | | | |
| 10_ | GTTTTCTGGAAGAGG | 137 | | | 10 | 94942018 | + |
| 94942018 | CATTTTCCCACTGGC | | | | | | |
| | TGAAAGAGCTAACAG | | | | | | |
| | AGGAT | | | | | | |
| 10_ | GTTTTCTGGAAGAGG | 138 | | | 10 | 94942018 | + |
| 94942018 | CATTTTCCCACTGGC | | | | | | |
| | TGAAAGAGCTAACAG | | | | | | |
| | AGGAT | | | | | | |
| 10_ | GTTTTCTGGAAGAGG | 139 | | | 10 | 94942018 | + |
| 94942018 | CATTTTCCCACTGGC | | | | | | |
| | TGAAAGAGCTAACAG | | | | | | |
| | AGGAT | | | | | | |
| rs77460 | CCTAGTTTCGTTTCT | 140 | | | 10 | 94942216 | + |
| 7211 | CTTCCTGTTAGGAAT | | | | | | |
| | TGTTTTCAGCAATGG | | | | | | |
| | AAAGA | | | | | | |
| rs77460 | TCCCAAAATTCCGCA | 141 | | | 10 | 94942216 | − |
| 7211 | GCGTCATGAGGGAGA | | | | | | |
| | AACGCCGGATCTCCT | | | | | | |
| | TCCAT | | | | | | |
| rs77460 | TCCCAAAATTCCGCA | 142 | | | 10 | 94942216 | − |
| 7211 | GCGTCATGAGGGAGA | | | | | | |
| | AACGCCGGATCTCCT | | | | | | |
| | TCCAT | | | | | | |
| rs76757 | TCTTCCTGTTAGGAA | 143 | | | 10 | 94942230 | + |
| 6260 | TTGTTTTCAGCAATG | | | | | | |
| | GAAAGARATGGAAGG | | | | | | |
| | AGATC | | | | | | |
| rs76757 | CTTCCTGTTAGGAAT | 144 | CTTCCTGTTAGGAAT | 1696 | 10 | 94942230 | + |
| 6260 | TGTTTTCAGCAATGG | | TGTTTTCAGCAATGG | | | | |
| | AAAGAAATGGAAGGA | | AAAGAAATGGAAGGA | | | | |
| | GATCT | | GATCC | | | | |
| rs76757 | TCTTCCTGTTAGGAA | 145 | | | 10 | 94942230 | + |
| 6260 | TTGTTTTCAGCAATG | | | | | | |
| | GAAAGAAATGGAAGG | | | | | | |
| | AGATC | | | | | | |
| rs12414 | TTCCTGTTAGGAATT | 146 | TTCCTGTTAGGAATT | 1697 | 10 | 94942231 | + |
| 460 | GTTTTCAGCAATGGA | | GTTTTCAGCAATGGA | | | | |
| | AAGAAATGGAAGGAG | | AAGAAATGGAAGGAG | | | | |
| | ATCCA | | ATCCG | | | | |
| rs12414 | TTCCTGTTAGGAATT | 147 | TTCCTGTTAGGAATT | 1698 | 10 | 94942231 | + |
| 460 | GTTTTCAGCAATGGA | | GTTTTCAGCAATGGA | | | | |
| | AAGAAATGGAAGGAG | | AAGAAATGGAAGGAG | | | | |
| | ATCCT | | ATCCG | | | | |
| rs12414 | TTCCTGTTAGGAATT | 148 | TTCCTGTTAGGAATT | 1699 | 10 | 94942231 | + |
| 460 | GTTTTCAGCAATGGA | | GTTTTCAGCAATGGA | | | | |
| | AAGAAATGGAAGGAG | | AAGAAATGGAAGGAG | | | | |
| | ATCCT | | ATCCG | | | | |
| rs12414 | CTTCCTGTTAGGAAT | 149 | | | 10 | 94942231 | + |
| 460 | TGTTTTCAGCAATGG | | | | | | |
| | AAAGAAATGGAAGGA | | | | | | |
| | GATCC | | | | | | |
| rs12414 | CTTCCTGTTAGGAAT | 150 | | | 10 | 94942231 | + |
| 460 | TGTTTTCAGCAATGG | | | | | | |
| | AAAGARATGGAAGGA | | | | | | |
| | GATCC | | | | | | |
| rs12414 | CTTCCTGTTAGGAAT | 151 | | | 10 | 94942231 | + |
| 460 | TGTTTTCAGCAATGG | | | | | | |
| | AAAGARATGGAAGGA | | | | | | |
| | GATCC | | | | | | |
| rs72558 | CCTGTTAGGAATTGT | 152 | | | 10 | 94942234 | + |
| 189 | TTTCAGCAATGGAAA | | | | | | |
| | GAAATGGAAGGAGAT | | | | | | |
| | CCGGC | | | | | | |
| rs72558 | CCTGTTAGGAATTGT | 153 | | | 10 | 94942234 | + |
| 189 | TTTCAGCAATGGAAA | | | | | | |
| | GAAATGGAAGGAGAT | | | | | | |
| | CCGGC | | | | | | |
| rs20096 | TTCAGCAATGGAAAG | 154 | TTCAGCAATGGAAAG | 1700 | 10 | 94942249 | + |
| 5026 | AAATGGAAGGAGATC | | AAATGGAAGGAGATC | | | | |
| | CGGCGTTTCTCCCTC | | CGGCGTTTCTCCCTC | | | | |
| | ATGAC | | ATGAG | | | | |
| rs20096 | TTGAACACGGTCCTC | 155 | TTGAACACGGTCCTC | 1701 | 10 | 94942249 | − |
| 5026 | AATGCTCCTCTTCCC | | AATGCTCCTCTTCCC | | | | |
| | CATCCCAAAATTCCG | | CATCCCAAAATTCCG | | | | |
| | CAGCA | | CAGCG | | | | |
| rs20096 | TTTCAGCAATGGAAA | 156 | | | 10 | 94942249 | + |
| 5026 | GAAATGGAAGGAGAT | | | | | | |
| | CCGGCGTTTCTCCCT | | | | | | |
| | CATGA | | | | | | |
| rs20018 | CTTCCTCTTGAACAC | 157 | | | 10 | 94942255 | − |
| 3364 | GGTCCTCAATGCTCC | | | | | | |
| | TCTTCCCCATCCCAA | | | | | | |
| | AATTC | | | | | | |
| rs20018 | CTTCCTCTTGAACAC | 158 | | | 10 | 94942255 | − |
| 3364 | GGTCCTCAATGCTCC | | | | | | |
| | TCTTCCCCATCCCAA | | | | | | |
| | AATTC | | | | | | |
| rs17998 | AGtAAGGTCAGTGAT | 159 | | | 10 | 94942290 | − |
| 53 | AtgGAGTAgGgTCCA | | | | | | |
| | GCGGGCTTCCTCTTG | | | | | | |
| | AACAC | | | | | | |
| rs17998 | CCCTCATGACGCTGC | 160 | | | 10 | 94942290 | + |
| 53 | GGAATTTTGGGATGG | | | | | | |
| | GGAAGAGGAGCATTG | | | | | | |
| | AGGAC | | | | | | |
| rs75448 | GTAGGGTCACCCACC | 161 | | | 10 | 94942305 | − |
| 7195 | CTTGGTTTTTCTCAA | | | | | | |
| | CTCCTCCACAAGGCA | | | | | | |
| | GHGGG | | | | | | |
| rs75448 | GTAGGGTCACCCACC | 162 | | | 10 | 94942305 | − |
| 7195 | CTTGGTTTTTCTCAA | | | | | | |
| | CTCCTCCACAAGGCA | | | | | | |
| | GHGGG | | | | | | |
| rs75448 | GTAGGGTCACCCACC | 163 | | | 10 | 94942305 | − |
| 7195 | CTTGGTTTTTCTCAA | | | | | | |
| | CTCCTCCACAAGGCA | | | | | | |
| | GCGGG | | | | | | |
| rs79001 | TTTGGGATGGGGAAG | 164 | TTTGGGATGGGGAAG | 1702 | 10 | 94942309 | + |
| 94 | AGGAGCATTGAGGAC | | AGGAGCATTGAGGAC | | | | |
| | CGTGTTCAAGAGGAA | | CGTGTTCAAGAGGAA | | | | |
| | GCCCA | | GCCCG | | | | |
| rs79001 | TTTGGGATGGGGAAG | 165 | TTTGGGATGGGGAAG | 1703 | 10 | 94942309 | + |
| 94 | AGGAGCATTGAGGAC | | AGGAGCATTGAGGAC | | | | |
| | CGTGTTCAAGAGGAA | | CGTGTTCAAGAGGAA | | | | |
| | GCCCA | | GCCCG | | | | |
| rs72558 | TATATCTAAAGTTTA | 166 | TATATCTAAAGTTTA | 1704 | 10 | 94947782 | + |
| 190 | ATAGTATTTTAAATT | | ATAGTATTTTAAATT | | | | |
| | GTTTCTAATTATTTA | | GTTTCTAATTATTTA | | | | |
| | GCCTA | | GCCTC | | | | |
| rs72558 | TATATCTAAAGTTTA | 167 | TATATCTAAAGTTTA | 1705 | 10 | 94947782 | + |
| 190 | ATAGTATTTTAAATT | | ATAGTATTTTAAATT | | | | |
| | GTTTCTAATTATTTA | | GTTTCTAATTATTTA | | | | |
| | GCCTA | | GCCTC | | | | |
| rs72558 | TATATCTAAAGTTTA | 168 | TATATCTAAAGTTTA | 1706 | 10 | 94947782 | + |
| 190 | ATAGTATTTTAAATT | | ATAGTATTTTAAATT | | | | |
| | GTTTCTAATTATTTA | | GTTTCTAATTATTTA | | | | |
| | GCCTA | | GCCTC | | | | |
| rs77455 | TATCTAAAGTTTAAT | 169 | | | 10 | 94947785 | + |
| 0549 | AGTATTTTAAATTGT | | | | | | |
| | TTCTAATTATTTAGC | | | | | | |
| | CTCAC | | | | | | |
| rs77455 | TATCTAAAGTTTAAT | 170 | | | 10 | 94947785 | + |
| 0549 | AGTATTTTAAATTGT | | | | | | |
| | TTCTAATTATTTAGC | | | | | | |
| | CTCAC | | | | | | |
| rs77455 | TATCTAAAGTTTAAT | 171 | | | 10 | 94947785 | + |
| 0549 | AGTATTTTAAATTGT | | | | | | |
| | TTCTAATTATTTAGC | | | | | | |
| | CTCAC | | | | | | |
| 10_ | TTGATTATAAAGATC | 172 | | | 10 | 94947907 | + |
| 94947907 | AGCAATTTCTTAACT | | | | | | |
| | TAATGGAAAAGTTGA | | | | | | |
| | ATGAA | | | | | | |
| 10_ | TGATTATAAAGATCA | 173 | TGATTATAAAGATCA | 1707 | 10 | 94947907 | + |
| 94947907 | GCAATTTCTTAACTT | | GCAATTTCTTAACTT | | | | |
| | AATGGAAAAGTTGAA | | AATGGAAAAGTTGAA | | | | |
| | TGAAA | | TGAAC | | | | |
| 10_ | TGATTATAAAGATCA | 174 | TGATTATAAAGATCA | 1708 | 10 | 94947907 | + |
| 94947907 | GCAATTTCTTAACTT | | GCAATTTCTTAACTT | | | | |
| | AATGGAAAAGTTGAA | | AATGGAAAAGTTGAA | | | | |
| | TGAAA | | TGAAC | | | | |
| rs13266 | TCTCAGGAAGCAAAA | 175 | | | 10 | 94947917 | − |
| 30788 | ATCTTGGCCTTACCT | | | | | | |
| | GGATCCAGGGGCTGC | | | | | | |
| | TCAAA | | | | | | |
| rs13266 | TCTCAGGAAGCAAAA | 176 | | | 10 | 94947917 | − |
| 30788 | ATCTTGGCCTTACCT | | | | | | |
| | GGATCCAGGGGCTGC | | | | | | |
| | TCAAA | | | | | | |
| rs13266 | TCTCAGGAAGCAAAA | 177 | | | 10 | 94947917 | − |
| 30788 | ATCTTGGCCTTACCT | | | | | | |
| | GGATCCAGGGGCTGC | | | | | | |
| | TCAAA | | | | | | |
| 10_ | ATGGAAAAGTTGAAT | 178 | ATGGAAAAGTTGAAT | 1709 | 10 | 94947938 | + |
| 94947938 | GAAAACATCAAGATT | | GAAAACATCAAGATT | | | | |
| | TTGAGCAGCCCCTGG | | TTGAGCAGCCCCTGG | | | | |
| | ATCCA | | ATCCT | | | | |
| 10_ | ATGGAAAAGTTGAAT | 179 | ATGGAAAAGTTGAAT | 1710 | 10 | 94947938 | + |
| 94947938 | GAAAACATCAAGAYT | | GAAAACATCAAGAYT | | | | |
| | TTGAGCAGCCCCTGG | | TTGAGCAGCCCCTGG | | | | |
| | ATCCA | | ATCCT | | | | |
| 10_ | ATGGAAAAGTTGAAT | 180 | ATGGAAAAGTTGAAT | 1711 | 10 | 94947938 | + |
| 94947938 | GAAAACATCAAGATT | | GAAAACATCAAGATT | | | | |
| | TTGAGCAGCCCCTGG | | TTGAGCAGCCCCTGG | | | | |
| | ATCCA | | ATCCT | | | | |
| 10_ | AGCAACGTTTTTAAG | 181 | | | 10 | 94949129 | − |
| 94949129 | TAATTTGTTGTGAGT | | | | | | |
| | TCCCGGGAAGTAATC | | | | | | |
| | AATGA | | | | | | |
| 10_ | AATTTAATAAATTAT | 182 | AATTTAATAAATTAT | 1712 | 10 | 94949129 | + |
| 94949129 | TGTTTTCTCTTAGAT | | TGTTTTCTCTTAGAT | | | | |
| | CTGCAATAATTTTTC | | CTGCAATAATTTTTC | | | | |
| | TCCTA | | TCCTG | | | | |
| 10_ | AATTTAATAAATTAT | 183 | AATTTAATAAATTAT | 1713 | 10 | 94949129 | + |
| 94949129 | TGTTTTCTCTTAGAT | | TGTTTTCTCTTAGAT | | | | |
| | CTGCAATAATTTTTC | | CTGCAATAATTTTTC | | | | |
| | TCCTA | | TCCTG | | | | |
| 10_ | TGTTTTCTCTTAGAT | 184 | TGTTTTCTCTTAGAT | 1714 | 10 | 94949144 | + |
| 94949144 | CTGCAATAATTTTTC | | CTGCAATAATTTTTC | | | | |
| | TCCTATCATTGATTA | | TCCTATCATTGATTA | | | | |
| | CTTCT | | CTTCC | | | | |
| 10_ | TGTTTTCTCTTAGAT | 185 | TGTTTTCTCTTAGAT | 1715 | 10 | 94949144 | + |
| 94949144 | CTGCAATAATTTTTC | | CTGCAATAATTTTTC | | | | |
| | TCCTATCATTGATTA | | TCCTATCATTGATTA | | | | |
| | CTTCT | | CTTCC | | | | |
| 10_ | TTGTTTTCTCTTAGA | 186 | | | 10 | 94949144 | + |
| 94949144 | TCTGCAATAATTTTT | | | | | | |
| | CTCCTATCATTGATT | | | | | | |
| | ACTTC | | | | | | |
| rs93321 | GGACATGAACAACCC | 187 | | | 10 | 94949280 | + |
| 30 | TCAGGACTTTATTGA | | | | | | |
| | TTGCTTCCTGATGAA | | | | | | |
| | AATGG | | | | | | |
| rs93321 | GGACATGAACAACCC | 188 | | | 10 | 94949280 | + |
| 30 | TCAGGACTTTATTGA | | | | | | |
| | TTGCTTCCTGATGAA | | | | | | |
| | AATGG | | | | | | |
| rs93321 | CACAAATTCACAAGC | 189 | | | 10 | 94949282 | − |
| 31 | AGTCACATAACTAAG | | | | | | |
| | CTTTTGTTTACATTT | | | | | | |
| | TACCT | | | | | | |
| rs93321 | CATGAACAACCCTCA | 190 | | | 10 | 94949282 | + |
| 31 | GGACTTTATTGATTG | | | | | | |
| | CTTCCTGATGAAAAT | | | | | | |
| | GGAGA | | | | | | |
| rs93321 | CATGAACAACCCTCA | 191 | | | 10 | 94949282 | + |
| 31 | GGACTTTATTGATTG | | | | | | |
| | CTTCCTGATGAAAAT | | | | | | |
| | GGAGA | | | | | | |
| rs18213 | AAACAAGTCAACTGC | 192 | | | 10 | 94972119 | − |
| 2442 | AGTGTTTTCCAAGCT | | | | | | |
| | TTCAAYAGTAAATTC | | | | | | |
| | AGATG | | | | | | |
| 10_ | CTCTGTCCCAGCTCC | 193 | | | 10 | 94972134 | − |
| 94972134 | AAACAAGTCAACTGC | | | | | | |
| | AGTGTTTTCCAAGCT | | | | | | |
| | TTCAA | | | | | | |
| 10_ | TTGCATCAAATCATT | 194 | | | 10 | 94972134 | + |
| 94972134 | CCTAGGAAAAGCACA | | | | | | |
| | ACCAACCATCTGAAT | | | | | | |
| | TTACT | | | | | | |
| 10_ | TTGCATCAAATCATT | 195 | | | 10 | 94972134 | + |
| 94972134 | CCTAGGAAAAGCACA | | | | | | |
| | ACCAAMCATCTGAAT | | | | | | |
| | TTACT | | | | | | |
| rs72558 | TTACTATTGAAAGCT | 196 | | | 10 | 94972179 | + |
| 192 | TGGAAAACACTGCAG | | | | | | |
| | TTGACTTGTTTGGAG | | | | | | |
| | CTGGG | | | | | | |
| rs72558 | TTACTATTGAAAGCT | 197 | | | 10 | 94972179 | + |
| 192 | TGGAAAACACTGCAG | | | | | | |
| | TTGACTTGTTTGGAG | | | | | | |
| | CTGGG | | | | | | |
| rs72558 | TTACTATTGAAAGCT | 198 | | | 10 | 94972179 | + |
| 192 | TGGAAAACACTGCAG | | | | | | |
| | TTGACTTGTTTGGAG | | | | | | |
| | CTGGG | | | | | | |
| rs98861 | CTTCAGCAGGAGAAG | 199 | CTTCAGCAGGAGAAG | 1716 | 10 | 94972180 | − |
| 7574 | GAGAGCATATYTCAG | | GAGAGCATATYTCAG | | | | |
| | GGTTGTGCTTGTCGT | | GGTTGTGCTTGTCGT | | | | |
| | CTCTG | | CTCTC | | | | |
| rs98861 | CTTCAGCAGGAGAAG | 200 | CTTCAGCAGGAGAAG | 1717 | 10 | 94972180 | − |
| 7574 | GAGAGCATATCTCAG | | GAGAGCATATCTCAG | | | | |
| | GGTTGTGCTTGTCGT | | GGTTGTGCTTGTCGT | | | | |
| | CTCTG | | CTCTC | | | | |
| rs98861 | CTTCAGCAGGAGAAG | 201 | CTTCAGCAGGAGAAG | 1718 | 10 | 94972180 | − |
| 7574 | GAGAGCATATCTCAG | | GAGAGCATATCTCAG | | | | |
| | GGTTGTGCTTGTCGT | | GGTTGTGCTTGTCGT | | | | |
| | CTCTG | | CTCTC | | | | |
| rs12372 | TTCTGAAAATTAATT | 202 | TTCTGAAAATTAATT | 1719 | 10 | 94972233 | − |
| 25311 | AACTTATCATCTCTG | | AACTTATCATCTCTG | | | | |
| | ATCATACCTGTGACC | | ATCATACCTGTGACC | | | | |
| | TCTGA | | TCTGG | | | | |
| rs12372 | TTCTGAAAATTAATT | 203 | TTCTGAAAATTAATT | 1720 | 10 | 94972233 | − |
| 25311 | AACTTATCATCTCTG | | AACTTATCATCTCTG | | | | |
| | ATCATACCTGTGACC | | ATCATACCTGTGACC | | | | |
| | TCTGA | | TCTGG | | | | |
| rs12372 | TTTCTGAAAATTAAT | 204 | | | 10 | 94972233 | − |
| 25311 | TAACTTATCATCTCT | | | | | | |
| | GATCATACCTGTGAC | | | | | | |
| | CTCTG | | | | | | |
| rs57505 | GGCTCCTGTCTTGCA | 205 | | | 10 | 94981201 | − |
| 750 | TGCAGGGGCTCCGGT | | | | | | |
| | TTCTGCCAATCACAC | | | | | | |
| | GTTCA | | | | | | |
| rs57505 | GCTCCTGTCTTGCAT | 206 | GCTCCTGTCTTGCAT | 1721 | 10 | 94981201 | − |
| 750 | GCAGGGGCTCCGGTT | | GCAGGGGCTCCGGTT | | | | |
| | TCTGCCAATCACACG | | TCTGCCAATCACACG | | | | |
| | TTCAA | | TTCAG | | | | |
| rs57505 | GCTCCTGTCTTGCAT | 207 | GCTCCTGTCTTGCAT | 1722 | 10 | 94981201 | − |
| 750 | GCAGGGGCTCCGGTT | | GCAGGGGCTCCGGTT | | | | |
| | TCTGCCAATCACACG | | TCTGCCAATCACACG | | | | |
| | TTCAA | | TTCAG | | | | |
| rs28371 | TCTTATCAGCTAAAG | 208 | | | 10 | 94981224 | + |
| 685 | TCCAGGAAGAGATTG | | | | | | |
| | AACGTGTGATTGGCA | | | | | | |
| | GAAAC | | | | | | |
| rs28371 | TCTTATCAGCTAAAG | 209 | | | 10 | 94981224 | + |
| 685 | TCCAGGAAGAGATTG | | | | | | |
| | AACGTGTGATTGGCA | | | | | | |
| | GAAAC | | | | | | |
| rs36782 | CTTATCAGCTAAAGT | 210 | | | 10 | 94981225 | + |
| 6293 | CCAGGAAGAGATTGA | | | | | | |
| | ACGTGTGATTGGCAG | | | | | | |
| | AAACC | | | | | | |
| rs36782 | CTTATCAGCTAAAGT | 211 | | | 10 | 94981225 | + |
| 6293 | CCAGGAAGAGATTGA | | | | | | |
| | ACGTGTGATTGGCAG | | | | | | |
| | AAACC | | | | | | |
| rs12745 | GTGCACCACAGCATC | 212 | | | 10 | 94981230 | − |
| 35931 | TGTGTAGGGCATGTG | | | | | | |
| | KCTCCTGTCTTGCAT | | | | | | |
| | GCAGG | | | | | | |
| rs12745 | GTGCACCACAGCATC | 213 | | | 10 | 94981230 | − |
| 35931 | TGTGTAGGGCATGTG | | | | | | |
| | KCTCCTGTCTTGCAT | | | | | | |
| | GCAGG | | | | | | |
| rs12745 | GTGCACCACAGCATC | 214 | | | 10 | 94981230 | − |
| 35931 | TGTGTAGGGCATGTG | | | | | | |
| | GCTCCTGTCTTGCAT | | | | | | |
| | GCAGG | | | | | | |
| rs75082 | ATTGAACGTGTGATT | 215 | | | 10 | 94981250 | + |
| 0937 | GGCAGAAACCRGAGC | | | | | | |
| | MCCTGCATGCAAGAC | | | | | | |
| | AGGAG | | | | | | |
| rs75082 | ATTGAACGTGTGATT | 216 | | | 10 | 94981250 | + |
| 0937 | GGCAGAAACCRGAGC | | | | | | |
| | MCCTGCATGCAAGAC | | | | | | |
| | AGGAG | | | | | | |
| rs75082 | TTGAACGTGTGATTG | 217 | TTGAACGTGTGATTG | 1723 | 10 | 94981250 | + |
| 0937 | GCAGAAACCGGAGCC | | GCAGAAACCGGAGCC | | | | |
| | CCTGCATGCAAGACA | | CCTGCATGCAAGACA | | | | |
| | GGAGA | | GGAGC | | | | |
| rs74906 | CACTGCATGGGGCAG | 218 | | | 10 | 94981281 | − |
| 0448 | GCTGGTGGGGAGAAG | | | | | | |
| | GTCAATGTATCTCTG | | | | | | |
| | GACCT | | | | | | |
| rs74906 | ACTGCATGGGGCAGG | 219 | ACTGCATGGGGCAGG | 1724 | 10 | 94981281 | − |
| 0448 | CTGGTGGGGAGAAGG | | CTGGTGGGGAGAAGG | | | | |
| | TCAATGTATCTCTGG | | TCAATGTATCTCTGG | | | | |
| | ACCTT | | ACCTC | | | | |
| rs74906 | CACTGCATGGGGCAG | 220 | | | 10 | 94981281 | − |
| 0448 | GCTGGTGGGGAGAAG | | | | | | |
| | GTCAATGTATCTCTG | | | | | | |
| | GACCT | | | | | | |
| rs10579 | TTAATGTCACAGGTC | 221 | TTAATGTCACAGGTC | 1725 | 10 | 94981296 | − |
| 10 | ACTGCATGGGGCAGG | | ACTGCATGGGGCAGG | | | | |
| | CTGGTGGGGAGAAGG | | CTGGTGGGGAGAAGG | | | | |
| | TCAAT | | TCAAG | | | | |
| rs10579 | TTAATGTCACAGGTC | 222 | TTAATGTCACAGGTC | 1726 | 10 | 94981296 | − |
| 10 | ACTGCATGGGGCAGG | | ACTGCATGGGGCAGG | | | | |
| | CTGGTGGGGAGAAGG | | CTGGTGGGGAGAAGG | | | | |
| | TCAAT | | TCAAG | | | | |
| rs10579 | TTAATGTCACAGGTC | 223 | TTAATGTCACAGGTC | 1727 | 10 | 94981296 | − |
| 10 | ACTGCATGGGGCAGG | | ACTGCATGGGGCAGG | | | | |
| | CTGGTGGGGAGAAGG | | CTGGTGGGGAGAAGG | | | | |
| | TCAAT | | TCAAG | | | | |
| rs56165 | AGCCACATGCCCTAC | 224 | AGCCACATGCCCTAC | 1728 | 10 | 94981297 | + |
| 452 | ACAGATGCTGTGGTG | | ACAGATGCTGTGGTG | | | | |
| | CACGAGGTCCAGAGA | | CACGAGGTCCAGAGA | | | | |
| | TACAT | | TACAC | | | | |
| rs56165 | ATTTAATGTCACAGG | 225 | | | 10 | 94981297 | − |
| 452 | TCACTGCATGGGGCA | | | | | | |
| | GGCTGGTGGGGAGAA | | | | | | |
| | KSTCA | | | | | | |
| rs56165 | ATTTAATGTCACAGG | 226 | | | 10 | 94981297 | − |
| 452 | TCACTGCATGGGGCA | | | | | | |
| | GGCTGGTGGGGAGAA | | | | | | |
| | GGTCA | | | | | | |
| rs28371 | ACATGCCCTAttCAG | 227 | ACATGCCCTAttCAG | 1729 | 10 | 94981301 | + |
| 686 | ATGCTGTaGTGCACG | | ATGCTGTaGTGCACG | | | | |
| | AGGTCCAGAGATACA | | AGGTCCAGAGATACA | | | | |
| | TtGAC | | TtGAG | | | | |
| rs28371 | TGAATTTAAtGTCAC | 228 | TGAATTTAAtGTCAC | 1730 | 10 | 94981301 | − |
| 686 | AGGTCACgGCATaGa | | AGGTCACgGCATaGa | | | | |
| | GCAGGCTGGTGGGGA | | GCAGGCTGGTGGGGA | | | | |
| | gaAGG | | gaAGC | | | | |
| rs28371 | TGAATTTAATGTCAC | 229 | TGAATTTAATGTCAC | 1731 | 10 | 94981301 | − |
| 686 | AGGTCACTGCATGGG | | AGGTCACTGCATGGG | | | | |
| | GCAGGCTGGTGGGGA | | GCAGGCTGGTGGGGA | | | | |
| | GAAKG | | GAAKC | | | | |
| rs12505 | CTGAATTTAATGTCA | 230 | CTGAATTTAATGTCA | 1732 | 10 | 94981302 | − |
| 77724 | CAGGTCACTGCATGG | | CAGGTCACTGCATGG | | | | |
| | GGCAGGCTGGTGGGG | | GGCAGGCTGGTGGGG | | | | |
| | AGAAT | | AGAAG | | | | |
| rs12505 | TCTGAATTTAATGTC | 231 | | | 10 | 94981302 | − |
| 77724 | ACAGGTCACTGCATG | | | | | | |
| | GGGCAGGCTGGTGGG | | | | | | |
| | GAGAA | | | | | | |
| rs12505 | TCTGAATTTAATGTC | 232 | | | 10 | 94981302 | − |
| 77724 | ACAGGTCACTGCATG | | | | | | |
| | GGGCAGGCTGGTGGG | | | | | | |
| | GAGAA | | | | | | |
| 10_ | CCTGCCCCATGCAGT | 233 | CCTGCCCCATGCAGT | 1733 | 10 | 94981365 | + |
| 94981365 | GACCTGTGACATTAA | | GACCTGTGACATTAA | | | | |
| | ATTCAGAAACTATCT | | ATTCAGAAACTATCT | | | | |
| | CATTT | | CATTC | | | | |
| 10_ | CCTGCCCCATGCAGT | 234 | CCTGCCCCATGCAGT | 1734 | 10 | 94981365 | + |
| 94981365 | GACCTGTGACATTAA | | GACCTGTGACATTAA | | | | |
| | ATTCAGAAACTATCT | | ATTCAGAAACTATCT | | | | |
| | CATTT | | CATTC | | | | |
| 10_ | GCCTGCCCCATGCAG | 235 | | | 10 | 94981365 | + |
| 94981365 | TGACCTGTGACATTA | | | | | | |
| | AATTCAGAAACTATC | | | | | | |
| | TCATT | | | | | | |
| rs76421 | GTTGGGAAATTCTTT | 236 | | | 10 | 94986042 | − |
| 1126 | GTTGTCATGTAGCAC | | | | | | |
| | AGAAGTCAGGGAAAT | | | | | | |
| | TAATA | | | | | | |
| rs76421 | GTTGGGAAATTCTTT | 237 | | | 10 | 94986042 | − |
| 1126 | GTTGTCATGTAGCAC | | | | | | |
| | AGAAGTCAGGGAAAT | | | | | | |
| | TAATA | | | | | | |
| rs76421 | GTTGGGAAATTCTTT | 238 | | | 10 | 94986042 | − |
| 1126 | GTTGTCATGTAGCAC | | | | | | |
| | AGAAGTCAGGGAAAT | | | | | | |
| | TAATA | | | | | | |
| rs72558 | TTGTTTCTAGGGCAC | 239 | | | 10 | 94986073 | + |
| 193 | AACCATATTAATTTC | | | | | | |
| | CCTGACTTCTGTGCT | | | | | | |
| | ACATG | | | | | | |
| rs72558 | TGTTTCTAGGGCACA | 240 | TGTTTCTAGGGCACA | 1735 | 10 | 94986073 | + |
| 193 | ACCATATTAATTTCC | | ACCATATTAATTTCC | | | | |
| | CTGACTTCTGTGCTA | | CTGACTTCTGTGCTA | | | | |
| | CATGA | | CATGC | | | | |
| rs72558 | TGTTTCTAGGGCACA | 241 | TGTTTCTAGGGCACA | 1736 | 10 | 94986073 | + |
| 193 | ACCATATTAATTTCC | | ACCATATTAATTTCC | | | | |
| | CTGACTTCTGTGCTA | | CTGACTTCTGTGCTA | | | | |
| | CATGA | | CATGC | | | | |
| 10_ | ACGCATGAGGAGTAA | 242 | ACGCATGAGGAGTAA | 1737 | 10 | 94988855 | + |
| 94988855 | CTGCTCTCTGTGTTT | | CTGCTCTCTGTGTTT | | | | |
| | GCTATTTTCAGGAAA | | GCTATTTTCAGGAAA | | | | |
| | ACGGT | | ACGGA | | | | |
| 10_ | ACGCATGAGGAGTAA | 243 | ACGCATGAGGAGTAA | 1738 | 10 | 94988855 | + |
| 94988855 | CTGCTCTCTGTGTTT | | CTGCTCTCTGTGTTT | | | | |
| | GCTATTTTCAGGAAA | | GCTATTTTCAGGAAA | | | | |
| | ACGGT | | ACGGA | | | | |
| 10_ | ACGCATGAGGAGTAA | 244 | ACGCATGAGGAGTAA | 1739 | 10 | 94988855 | + |
| 94988855 | CTGCTCTCTGTGTTT | | CTGCTCTCTGTGTTT | | | | |
| | GCTATTTTCAGGAAA | | GCTATTTTCAGGAAA | | | | |
| | ACGGT | | ACGGA | | | | |
| rs76994 | AAGCCCTGGCCGGCA | 245 | AAGCCCTGGCCGGCA | 1740 | 10 | 94988917 | + |
| 2899 | TGGAGCTGTTTTTAT | | TGGAGCTGTTTTTAT | | | | |
| | TCCTGACCTCCATTT | | TCCTGACCTCCATTT | | | | |
| | TACAC | | TACAG | | | | |
| rs76994 | AAGCCCTGGCCGGCA | 246 | AAGCCCTGGCCGGCA | 1741 | 10 | 94988917 | + |
| 2899 | TGGAGCTGTTTTTAT | | TGGAGCTGTTTTTAT | | | | |
| | TCCTGACCTCCATTT | | TCCTGACCTCCATTT | | | | |
| | TACAC | | TACAG | | | | |
| rs76994 | AAGCCCTGGCCGGCA | 247 | AAGCCCTGGCCGGCA | 1742 | 10 | 94988917 | + |
| 2899 | TGGAGCTGTTTTTAT | | TGGAGCTGTTTTTAT | | | | |
| | TCCTGACCTCCATTT | | TCCTGACCTCCATTT | | | | |
| | TACAC | | TACAG | | | | |
| rs20220 | TGACAACTGGAGTGG | 248 | | | 10 | 94988925 | − |
| 1137 | TGTCAAGGTTCTTTG | | | | | | |
| | GGTCAACCAGAGATT | | | | | | |
| | TCAGG | | | | | | |
| rs20220 | GACAACTGGAGTGGT | 249 | GACAACTGGAGTGGT | 1743 | 10 | 94988925 | − |
| 1137 | GTCAAGGTTCTTTGG | | GTCAAGGTTCTTTGG | | | | |
| | GTCAACCAGAGATTT | | GTCAACCAGAGATTT | | | | |
| | CAGGT | | CAGGC | | | | |
| rs20220 | TGACAACTGGAGTGG | 250 | | | 10 | 94988925 | − |
| 1137 | TGTCAAGGTTCTTTG | | | | | | |
| | GGTCAACCAGAGATT | | | | | | |
| | TCAGG | | | | | | |
| rs76728 | TCCATTTTACAGAAC | 251 | TCCATTTTACAGAAC | 1744 | 10 | 94988955 | + |
| 4820 | TTTAACCTGAAATCT | | TTTAACCTGAAATCT | | | | |
| | CTGGTTGACCCAAAG | | CTGGTTGACCCAAAG | | | | |
| | AACCT | | AACCC | | | | |
| rs76728 | TCCATTTTACAGAAC | 252 | TCCATTTTACAGAAC | 1745 | 10 | 94988955 | + |
| 4820 | TTTAACCTGAAATCT | | TTTAACCTGAAATCT | | | | |
| | CTGGTTGACCCAAAG | | CTGGTTGACCCAAAG | | | | |
| | AACCT | | AACCC | | | | |
| rs76728 | CTCCATTTTACAGAA | 253 | | | 10 | 94988955 | + |
| 4820 | CTTTAACCTGAAATC | | | | | | |
| | TCTGGTTGACCCAAA | | | | | | |
| | GAACC | | | | | | |
| rs78158 | TCTTCTTCAGACAGG | 254 | | | 10 | 94988984 | − |
| 3846 | AATGAAGCACAGCTG | | | | | | |
| | GTAGAAGGGCGGCAC | | | | | | |
| | AGAGG | | | | | | |
| rs78158 | TCTTCTTCAGACAGG | 255 | | | 10 | 94988984 | − |
| 3846 | AATGAAGCACAGCTG | | | | | | |
| | GTAGAAGGGCGGCAC | | | | | | |
| | AGAGG | | | | | | |
| rs78158 | CTCTGGTTGACCCAA | 256 | | | 10 | 94988984 | + |
| 3846 | AGAACCTTGACACCA | | | | | | |
| | CTCCAGTTGTCAATG | | | | | | |
| | GATTT | | | | | | |
| rs93322 | CTGCAGGGACTGCAC | 257 | | | 10 | 94989020 | − |
| 39 | AGCAGCAGCCAGGCC | | | | | | |
| | ATCTGCTCTTCTTCA | | | | | | |
| | GACAG | | | | | | |
| rs93322 | CTGCAGGGACTGCAC | 258 | | | 10 | 94989020 | − |
| 39 | AGCAGCAGCCAGGCC | | | | | | |
| | ATCTGCTCTTCTTCA | | | | | | |
| | GACAG | | | | | | |
| rs86818 | GAGCTGCAGGGACTG | 259 | | | 10 | 94989023 | − |
| 2778 | CACAGCAGCAGCCAG | | | | | | |
| | GCCATCTGCTCTTCT | | | | | | |
| | TCAGA | | | | | | |
| rs86818 | AGCTGCAGGGACTGC | 260 | AGCTGCAGGGACTGC | 1746 | 10 | 94989023 | − |
| 2778 | ACAGCAGCAGCCAGG | | ACAGCAGCAGCCAGG | | | | |
| | CCATCTGCTCTTCTT | | CCATCTGCTCTTCTT | | | | |
| | CAGAA | | CAGAC | | | | |
| rs86818 | GAGCTGCAGGGACTG | 261 | | | 10 | 94989023 | − |
| 2778 | CACAGCAGCAGCCAG | | | | | | |
| | GCCATCTGCTCTTCT | | | | | | |
| | TCAGA | | | | | | |
| rs12769 | CATCTCTTTCCATTG | 262 | | | 10 | 96535124 | − |
| 205 | CTGAAAACGATTCCT | | | | | | |
| | AACAGGAAGAGAAAC | | | | | | |
| | GAAAC | | | | | | |
| rs13814 | ATCAGTTCTTACTTG | 263 | | | 10 | 96602618 | + |
| 2612 | TGTCTTGTCAGCTAA | | | | | | |
| | AGTCCAGGAAGAGAT | | | | | | |
| | TGAAC | | | | | | |
| rs13814 | ATCAGTTCTTACTTG | 264 | | | 10 | 96602618 | + |
| 2612 | TGTCTTGTCAGCTAA | | | | | | |
| | AGTCCAGGAAGAGAT | | | | | | |
| | TGAAC | | | | | | |
| rs11393 | GATACATCGACCTCA | 265 | | | 10 | 96602752 | + |
| 4938 | TCCCCACCAGCCTGC | | | | | | |
| | CCCATGCAGTGACCT | | | | | | |
| | GTGAC | | | | | | |
| rs56337 | AGTTACACATGAGGA | 266 | | | 10 | 96612495 | + |
| 013 | GTAACTTCTCCCTAT | | | | | | |
| | GTTTGTTATTTTCAG | | | | | | |
| | GAAAA | | | | | | |
| rs56337 | AGTTACACATGAGGA | 267 | | | 10 | 96612495 | + |
| 013 | GTAACTTCTCCCTAT | | | | | | |
| | GTTTGTTATTTTCAG | | | | | | |
| | GAAAA | | | | | | |
| rs93320 | TACTGATAGTGTACA | 268 | | | 10 | 96696674 | − |
| 94 | ATGATTCAGGATTTC | | | | | | |
| | GTAATTCAGTCTAGT | | | | | | |
| | AAATT | | | | | | |
| rs93320 | TACTGATAGTGTACA | 269 | | | 10 | 96696674 | − |
| 94 | ATGATTCAGGATTTC | | | | | | |
| | GTAATTCAGTCTAGT | | | | | | |
| | AAATT | | | | | | |
| rs72558 | CCTGTTAGGAATTGT | 270 | | | 10 | 96701991 | + |
| 189 | TTTCAGCAATGGAAA | | | | | | |
| | GAAATGGAAGGAGAT | | | | | | |
| | CCGGC | | | | | | |
| rs20018 | CAATGGAAAGAAATG | 271 | | | 10 | 96702012 | + |
| 3364 | GAAGGAGATCCGGCG | | | | | | |
| | TTTCTCCCTCATGAC | | | | | | |
| | GCTGC | | | | | | |
| rs17998 | CCCTCATGACGCTGC | 272 | | | 10 | 96702047 | + |
| 53 | GGAATTTTGGGATGG | | | | | | |
| | GGAAGAGGAGCATTG | | | | | | |
| | AGGAC | | | | | | |
| rs79001 | TTTGGGATGGGGAAG | 273 | TTTGGGATGGGGAAG | 1747 | 10 | 96702066 | + |
| 94 | AGGAGCATTGAGGAC | | AGGAGCATTGAGGAC | | | | |
| | CGTGTTCAAGAGGAA | | CGTGTTCAAGAGGAA | | | | |
| | GCCCA | | GCCCG | | | | |
| rs93321 | CAAATTCACAAGCAG | 274 | | | 10 | 96709037 | − |
| 30 | TCACATAACTAAGCT | | | | | | |
| | TTTGTTTACATTTTA | | | | | | |
| | CCTTC | | | | | | |
| rs18213 | AAACAAGTCAACTGC | 275 | | | 10 | 96731876 | − |
| 2442 | AGTGTTTTCCAAGCT | | | | | | |
| | TTCAATAGTAAATTC | | | | | | |
| | AGATG | | | | | | |
| rs18213 | AAACAAGTCAACTGC | 276 | | | 10 | 96731876 | − |
| 2442 | AGTGTTTTCCAAGCT | | | | | | |
| | TTCAATAGTAAATTC | | | | | | |
| | AGATG | | | | | | |
| rs28371 | TCTTATCAGCTAAAG | 277 | | | 10 | 96740981 | + |
| 685 | TCCAGGAAGAGATTG | | | | | | |
| | AACGTGTGATTGGCA | | | | | | |
| | GAAAC | | | | | | |
| rs36782 | CTTATCAGCTAAAGT | 278 | | | 10 | 96740982 | + |
| 6293 | CCAGGAAGAGATTGA | | | | | | |
| | ACGTGTGATTGGCAG | | | | | | |
| | AAACC | | | | | | |
| rs93322 | CTGCAGGGACTGCAC | 279 | | | 10 | 96748777 | − |
| 39 | AGCAGCAGCCAGGCC | | | | | | |
| | ATCTGCTCTTCTTCA | | | | | | |
| | GACAG | | | | | | |
| rs41490 | ATGGTACTATGGGAG | 280 | | | 12 | 21178615 | − |
| 56 | TCTCCCCTATTCCAC | | | | | | |
| | GAAGCATATTACCCA | | | | | | |
| | TGAAC | | | | | | |
| rs41490 | TATCTACATAGGTTG | 281 | | | 12 | 21178615 | + |
| 56 | TTTAAAGGAATCTGG | | | | | | |
| | GTCATACATGTGGAT | | | | | | |
| | ATATG | | | | | | |
| rs41490 | TATCTACATAGGTTG | 282 | | | 12 | 21178615 | + |
| 56 | TTTAAAGGAATCTGG | | | | | | |
| | GTCATACATGTGGAT | | | | | | |
| | ATATG | | | | | | |
| rs74607 | ACGCAACGCGGATGC | 283 | | | 13 | 48037801 | − |
| 1566 | TTGCAGCTGGTCACC | | | | | | |
| | ACGACTCCGACTCCG | | | | | | |
| | ACTCC | | | | | | |
| rs74607 | ACGCAACGCGGATGC | 284 | | | 13 | 48037801 | − |
| 1566 | TTGCAGCTGGTCACC | | | | | | |
| | ACGACTCCGACTCCG | | | | | | |
| | ACTCC | | | | | | |
| rs74607 | ACGCAACGCGGATGC | 285 | | | 13 | 48037801 | − |
| 1566 | TTGCAGCTGGTCACC | | | | | | |
| | ACGACTCCGACTCCG | | | | | | |
| | ACTCC | | | | | | |
| rs11685 | GGGTTCCTTGGGAAG | 286 | | | 13 | 48045719 | + |
| 5232 | AACTACCTCCCCTGG | | | | | | |
| | ACCAGCTTTTCTGGG | | | | | | |
| | GACTG | | | | | | |
| rs11685 | GGGTTCCTTGGGAAG | 287 | | | 13 | 48045719 | + |
| 5232 | AACTACCTCCCCTGG | | | | | | |
| | ACCAGCTTTTCTGGG | | | | | | |
| | GACTG | | | | | | |
| rs11685 | GGGTTCCTTGGGAAG | 288 | | | 13 | 48045719 | + |
| 5232 | AACTACCTCCCCTGG | | | | | | |
| | ACCAGCTTTTCTGGG | | | | | | |
| | GACTG | | | | | | |
| rs99232 | ATCCCTCTGGGAAGT | 289 | | | 16 | 31096368 | − |
| 31 | CAAGCAAGAGAAGAC | | | | | | |
| | CTGAAAAACAACCAT | | | | | | |
| | TGGCC | | | | | | |
| rs99232 | ATCCCTCTGGGAAGT | 290 | | | 16 | 31096368 | − |
| 31 | CAAGCAAGAGAAGAC | | | | | | |
| | CTGAAAAACAACCAT | | | | | | |
| | TGGCC | | | | | | |
| rs99232 | ATCCCTCTGGGAAGT | 291 | | | 16 | 31096368 | − |
| 31 | CAAGCAAGAGAAGAC | | | | | | |
| | CTGAAAAACAACCAT | | | | | | |
| | TGGCC | | | | | | |
| rs21086 | CAGGCATTATCTGCC | 292 | | | 19 | 15879621 | − |
| 22 | TCATCAGTGTTTTCG | | | | | | |
| | GAACCCATCACAACC | | | | | | |
| | CAGCT | | | | | | |
| rs21086 | CAGGCATTATCTGCC | 293 | | | 19 | 15879621 | − |
| 22 | TCATCAGTGTTTTCG | | | | | | |
| | GAACCCATCACAACC | | | | | | |
| | CAGCT | | | | | | |
| rs21086 | CAGGCATTATCTGCC | 294 | | | 19 | 15879621 | − |
| 22 | TCATCAGTGTTTTCG | | | | | | |
| | GAACCCATCACAACC | | | | | | |
| | CAGCT | | | | | | |
| rs19392 | AGGTGGTCCTGCAGT | 295 | | | 19 | 38440802 | + |
| 2747 | GCAGCGCTACCGTGC | | | | | | |
| | TCAAGGAGCAGCTCA | | | | | | |
| | AGCTC | | | | | | |
| rs19392 | AGTGGGCTCCAGGAA | 296 | | | 19 | 38440802 | − |
| 2747 | GCACAGGCGGTTGCC | | | | | | |
| | GAAGCCCTCGGCGGC | | | | | | |
| | CAGGC | | | | | | |
| rs19392 | AGTGGGCTCCAGGAA | 297 | | | 19 | 38440802 | − |
| 2747 | GCACAGGCGGTTGCC | | | | | | |
| | GAAGCCCTCGGCGGC | | | | | | |
| | CAGGC | | | | | | |
| rs19392 | TGCTCAAGGAGCAGC | 298 | | | 19 | 38440829 | + |
| 2748 | TCAAGCTCTGCCTGG | | | | | | |
| | CCGCCGAGGGCTTCG | | | | | | |
| | GCAAC | | | | | | |
| rs19392 | CCCTCCTGCACAGAC | 299 | | | 19 | 38440829 | − |
| 2748 | CTGCGCGTTGCTAGT | | | | | | |
| | GGGCTCCAGGAAGCA | | | | | | |
| | CAGGC | | | | | | |
| rs19392 | CCCTCCTGCACAGAC | 300 | | | 19 | 38440829 | − |
| 2748 | CTGCGCGTTGCTAGT | | | | | | |
| | GGGCTCCAGGAAGCA | | | | | | |
| | CAGGC | | | | | | |
| rs11819 | GGTGGACCATGCACC | 301 | | | 19 | 38444211 | + |
| 2161 | CAGCCTCCAAGCAGA | | | | | | |
| | GGTCTGAAGGAGAAA | | | | | | |
| | AGGTC | | | | | | |
| rs11819 | GGTGGACCATGCACC | 302 | | | 19 | 38444211 | + |
| 2161 | CAGCCTCCAAGCAGA | | | | | | |
| | GGTCTGAAGGAGAAA | | | | | | |
| | AGGTC | | | | | | |
| rs19392 | CAGGTAGCGCTCGGA | 303 | CAGGTAGCGCTCGGA | 1748 | 19 | 38444212 | − |
| 2753 | GGAGACACTGACAAG | | GGAGACACTGACAAG | | | | |
| | GATGATGTCATCCCC | | GATGATGTCATCCCC | | | | |
| | AACGT | | AACGC | | | | |
| rs19392 | CAGGTAGCGCTCGGA | 304 | CAGGTAGCGCTCGGA | 1749 | 19 | 38444212 | − |
| 2753 | GGAGACACTGACAAG | | GGAGACACTGACAAG | | | | |
| | GATGATGTCATCCCC | | GATGATGTCATCCCC | | | | |
| | AACGT | | AACGC | | | | |
| rs19392 | CAGGTAGCGCTCGGA | 305 | CAGGTAGCGCTCGGA | 1750 | 19 | 38444212 | − |
| 2753 | GGAGACACTGACAAG | | GGAGACACTGACAAG | | | | |
| | GATGATGTCATCCCC | | GATGATGTCATCCCC | | | | |
| | AACGT | | AACGC | | | | |
| rs18010 | AACCCTTGACTTCAC | 306 | AACCCTTGACTTCAC | 1751 | 19 | 38446710 | + |
| 86 | TCTCTTCTGTGTCCC | | TCTCTTCTGTGTCCC | | | | |
| | CAGACTTGTCTACTA | | CAGACTTGTCTACTA | | | | |
| | TGAGA | | TGAGG | | | | |
| rs18010 | AACCCTTGACTTCAC | 307 | AACCCTTGACTTCAC | 1752 | 19 | 38446710 | + |
| 86 | TCTCTTCTGTGTCCC | | TCTCTTCTGTGTCCC | | | | |
| | CAGACTTGTCTACTA | | CAGACTTGTCTACTA | | | | |
| | TGAGC | | TGAGG | | | | |
| rs18010 | GAACCCTTGACTTCA | 308 | | | 19 | 38446710 | + |
| 86 | CTCTCTTCTGTGTCC | | | | | | |
| | CCAGACTTGTCTACT | | | | | | |
| | ATGAG | | | | | | |
| rs19392 | AGTGACTCCCCGTAC | 309 | AGTGACTCCCCGTAC | 1753 | 19 | 38448673 | − |
| 2762 | TTGATCTCAGGGGGG | | TTGATCTCAGGGGGG | | | | |
| | CCCATGCCCTCCACA | | CCCATGCCCTCCACA | | | | |
| | TCCCA | | TCCCG | | | | |
| rs19392 | AGTGACTCCCCGTAC | 310 | AGTGACTCCCCGTAC | 1754 | 19 | 38448673 | − |
| 2762 | TTGATCTCAGGGGGG | | TTGATCTCAGGGGGG | | | | |
| | CCCATGCCCTCCACA | | CCCATGCCCTCCACA | | | | |
| | TCCCA | | TCCCG | | | | |
| rs19392 | AGTGACTCCCCGTAC | 311 | AGTGACTCCCCGTAC | 1755 | 19 | 38448673 | − |
| 2762 | TTGATCTCAGGGGGG | | TTGATCTCAGGGGGG | | | | |
| | CCCATGCCCTCCACA | | CCCATGCCCTCCACA | | | | |
| | TCCCA | | TCCCG | | | | |
| rs12191 | GTGAGCCACAGTCCT | 312 | GTGAGCCACAGTCCT | 1756 | 19 | 38448712 | − |
| 8592 | GAGGCCACATGCTGC | | GAGGCCACATGCTGC | | | | |
| | ACGAAGCACAGTGAC | | ACGAAGCACAGTGAC | | | | |
| | TCCCG | | TCCCC | | | | |
| rs12191 | GTGAGCCACAGTCCT | 313 | GTGAGCCACAGTCCT | 1757 | 19 | 38448712 | − |
| 8592 | GAGGCCACATGCTGC | | GAGGCCACATGCTGC | | | | |
| | ACGAAGCACAGTGAC | | ACGAAGCACAGTGAC | | | | |
| | TCCCG | | TCCCC | | | | |
| rs12191 | GTGAGCCACAGTCCT | 314 | GTGAGCCACAGTCCT | 1758 | 19 | 38448712 | − |
| 8592 | GAGGCCACATGCTGC | | GAGGCCACATGCTGC | | | | |
| | ACGAAGCACAGTGAC | | ACGAAGCACAGTGAC | | | | |
| | TCCCG | | TCCCC | | | | |
| rs19392 | GCTCACTTGATGAAC | 315 | GCTCACTTGATGAAC | 1759 | 19 | 38451842 | − |
| 2764 | TGGTTGTATAGGCCA | | TGGTTGTATAGGCCA | | | | |
| | TTGGTGCTGTGGATC | | TTGGTGCTGTGGATC | | | | |
| | ATGCA | | ATGCG | | | | |
| rs19392 | GCTCACTTGATGAAC | 316 | GCTCACTTGATGAAC | 1760 | 19 | 38451842 | − |
| 2764 | TGGTTGTATAGGCCA | | TGGTTGTATAGGCCA | | | | |
| | TTGGTGCTGTGGATC | | TTGGTGCTGTGGATC | | | | |
| | ATGCA | | ATGCG | | | | |
| rs19392 | GCTCACTTGATGAAC | 317 | GCTCACTTGATGAAC | 1761 | 19 | 38451842 | − |
| 2764 | TGGTTGTATAGGCCA | | TGGTTGTATAGGCCA | | | | |
| | TTGGTGCTGTGGATC | | TTGGTGCTGTGGATC | | | | |
| | ATGCA | | ATGCG | | | | |
| rs11819 | GGCAGGTTGCTCACT | 318 | GGCAGGTTGCTCACT | 1762 | 19 | 38451850 | − |
| 2116 | TGATGAACTGGTTGT | | TGATGAACTGGTTGT | | | | |
| | ATAGGCCATTGGTGC | | ATAGGCCATTGGTGC | | | | |
| | TGTGG | | TGTGC | | | | |
| rs11819 | GGCAGGTTGCTCACT | 319 | GGCAGGTTGCTCACT | 1763 | 19 | 38451850 | − |
| 2116 | TGATGAACTGGTTGT | | TGATGAACTGGTTGT | | | | |
| | ATAGGCCATTGGTGC | | ATAGGCCATTGGTGC | | | | |
| | TGTGG | | TGTGC | | | | |
| rs11819 | TGCAGGGGAGGAGGC | 320 | | | 19 | 38455359 | + |
| 2162 | AGCCGAGTCCTGGAA | | | | | | |
| | AGAGATTGTGAATCT | | | | | | |
| | TCTCT | | | | | | |
| rs11819 | GCAGGGGAGGAGGCA | 321 | GCAGGGGAGGAGGCA | 1764 | 19 | 38455359 | + |
| 2162 | GCCGAGTCCTGGAAA | | GCCGAGTCCTGGAAA | | | | |
| | GAGATTGTGAATCTT | | GAGATTGTGAATCTT | | | | |
| | CTCTA | | CTCTC | | | | |
| rs11819 | TGGGGTGTTCTCAGG | 322 | TGGGGTGTTCTCAGG | 1765 | 19 | 38455359 | − |
| 2162 | GGAGTCAGGACTGGG | | GGAGTCAGGACTGGG | | | | |
| | ACCCCTACCTAGGAG | | ACCCCTACCTAGGAG | | | | |
| | TTCAT | | TTCAG | | | | |
| rs11819 | TGGGGTGTTCTCAGG | 323 | TGGGGTGTTCTCAGG | 1766 | 19 | 38455359 | − |
| 2162 | GGAGTCAGGACTGGG | | GGAGTCAGGACTGGG | | | | |
| | ACCCCTACCTAGGAG | | ACCCCTACCTAGGAG | | | | |
| | TTCAT | | TTCAG | | | | |
| rs11188 | CCAGTCCTATTGGAT | 324 | CCAGTCCTATTGGAT | 1767 | 19 | 38455463 | + |
| 8148 | CTGACACCTCTTCCC | | CTGACACCTCTTCCC | | | | |
| | CSCTCAGCTTCTCTA | | CSCTCAGCTTCTCTA | | | | |
| | ATCCA | | ATCCG | | | | |
| rs11188 | CCAGTCCTATTGGAT | 325 | CCAGTCCTATTGGAT | 1768 | 19 | 38455463 | + |
| 8148 | CTGACACCTCTTCCC | | CTGACACCTCTTCCC | | | | |
| | CCCTCAGCTTCTCTA | | CCCTCAGCTTCTCTA | | | | |
| | ATCCA | | ATCCG | | | | |
| rs11188 | CCAGTCCTATTGGAT | 326 | CCAGTCCTATTGGAT | 1769 | 19 | 38455463 | + |
| 8148 | CTGACACCTCTTCCC | | CTGACACCTCTTCCC | | | | |
| | CCCTCAGCTTCTCTA | | CCCTCAGCTTCTCTA | | | | |
| | ATCCA | | ATCCG | | | | |
| rs19392 | TTGCTGACCAGCCAG | 327 | TTGCTGACCAGCCAG | 1770 | 19 | 38455471 | − |
| 2768 | TCCAAGTTTGTGGAG | | TCCAAGTTTGTGGAG | | | | |
| | AAGAGGGCACAGTTG | | AAGAGGGCACAGTTG | | | | |
| | CTAYA | | CTAYG | | | | |
| rs19392 | TTGCTGACCAGCCAG | 328 | TTGCTGACCAGCCAG | 1771 | 19 | 38455471 | − |
| 2768 | TCCAAGTTTGTGGAG | | TCCAAGTTTGTGGAG | | | | |
| | AAGAGGGCACAGTTG | | AAGAGGGCACAGTTG | | | | |
| | CTAYA | | CTAYG | | | | |
| rs19392 | TATTGGATCTGACAC | 329 | | | 19 | 38455471 | + |
| 2768 | CTCTTCCCCCCTCAG | | | | | | |
| | CTTCTCTAATCCGTG | | | | | | |
| | GCAAT | | | | | | |
| rs14433 | ATTGGATCTGACACC | 330 | | | 19 | 38455472 | + |
| 6148 | TCTTCCCCCCTCAGC | | | | | | |
| | TTCTCTAATCCGTGG | | | | | | |
| | CAATC | | | | | | |
| rs14433 | ATTGGATCTGACACC | 331 | | | 19 | 38455472 | + |
| 6148 | TCTTCCCCCCTCAGC | | | | | | |
| | TTCTCTAATCCGTGG | | | | | | |
| | CAATC | | | | | | |
| rs19392 | AGCCTCTGTCCCACT | 332 | | | 19 | 38455528 | − |
| 2770 | CCCCCGGGTTCTCCT | | | | | | |
| | ACCAGACGAGGCCTC | | | | | | |
| | CAGCC | | | | | | |
| rs19392 | AGCCTCTGTCCCACT | 333 | | | 19 | 38455528 | − |
| 2770 | CCCCCGGGTTCTCCT | | | | | | |
| | ACCAGACGAGGCCTC | | | | | | |
| | CAGCC | | | | | | |
| rs19392 | AGCCTCTGTCCCACT | 334 | | | 19 | 38455528 | − |
| 2770 | CCCCCGGGTTCTCCT | | | | | | |
| | ACCAGACGAGGCCTC | | | | | | |
| | CAGCC | | | | | | |
| rs11819 | AAGCTCACGGCCAGG | 335 | | | 19 | 38457545 | − |
| 2172 | CAGCAAGTTCTCAGT | | | | | | |
| | AATAAGATCTTGGTT | | | | | | |
| | GGAGC | | | | | | |
| rs11819 | AAGCTCACGGCCAGG | 336 | | | 19 | 38457545 | − |
| 2172 | CAGCAAGTTCTCAGT | | | | | | |
| | AATAAGATCTTGGTT | | | | | | |
| | GGAGC | | | | | | |
| rs11819 | AAGCTCACGGCCAGG | 337 | | | 19 | 38457545 | − |
| 2172 | CAGCAAGTTCTCAGT | | | | | | |
| | AATAAGATCTTGGTT | | | | | | |
| | GGAGC | | | | | | |
| rs19392 | GTCCTGGACGTGCTA | 338 | GTCCTGGACGTGCTA | 1772 | 19 | 38457546 | + |
| 2772 | TGCTCCCTGTGTGTG | | TGCTCCCTGTGTGTG | | | | |
| | TGTAATGGTGTGGCT | | TGTAATGGTGTGGCT | | | | |
| | GTACT | | GTACG | | | | |
| rs19392 | AAGCTCACGGCCAGG | 339 | AAGCTCACGGCCAGG | 1773 | 19 | 38457546 | − |
| 2772 | CAGCAAGTTCTCAGT | | CAGCAAGTTCTCAGT | | | | |
| | AATAAGATCTTGGTT | | AATAAGATCTTGGTT | | | | |
| | GGAGA | | GGAGC | | | | |
| rs19392 | AAGCTCACGGCCAGG | 340 | AAGCTCACGGCCAGG | 1774 | 19 | 38457546 | − |
| 2772 | CAGCAAGTTCTCAGT | | CAGCAAGTTCTCAGT | | | | |
| | AATAAGATCTTGGTT | | AATAAGATCTTGGTT | | | | |
| | GGAGA | | GGAGC | | | | |
| rs11819 | CGTCCTCCGTGGAAG | 341 | | | 19 | 38494564 | + |
| 2175 | ACACCATGAGCCTGC | | | | | | |
| | TCGAGTGCCTCGGCC | | | | | | |
| | AGATC | | | | | | |
| rs11819 | TCCTCCGTGGAAGAC | 342 | TCCTCCGTGGAAGAC | 1775 | 19 | 38494565 | + |
| 2163 | ACCATGAGCCTGCTC | | ACCATGAGCCTGCTC | | | | |
| | GAGTGCCTCGGCCAG | | GAGTGCCTCGGCCAG | | | | |
| | ATCCA | | ATCCG | | | | |
| rs11819 | TCCTCCGTGGAAGAC | 343 | TCCTCCGTGGAAGAC | 1776 | 19 | 38494565 | + |
| 2163 | ACCATGAGCCTGCTC | | ACCATGAGCCTGCTC | | | | |
| | GAGTGCCTCGGCCAG | | GAGTGCCTCGGCCAG | | | | |
| | ATCCA | | ATCCG | | | | |
| rs11819 | TCCTCCGTGGAAGAC | 344 | TCCTCCGTGGAAGAC | 1777 | 19 | 38494565 | + |
| 2163 | ACCATGAGCCTGCTC | | ACCATGAGCCTGCTC | | | | |
| | GAGTGCCTCGGCCAG | | GAGTGCCTCGGCCAG | | | | |
| | ATCCA | | ATCCG | | | | |
| rs11819 | ACACCATGAGCCTGC | 345 | | | 19 | 38494579 | + |
| 2176 | TCGAGTGCCTCGGCC | | | | | | |
| | AGATCCGCTCGCTGC | | | | | | |
| | TCATC | | | | | | |
| rs11819 | ACACCATGAGCCTGC | 346 | | | 19 | 38494579 | + |
| 2176 | TCGAGTGCCTCGGCC | | | | | | |
| | AGATCCGCTCGCTGC | | | | | | |
| | TCATC | | | | | | |
| rs11819 | ACACCATGAGCCTGC | 347 | | | 19 | 38494579 | + |
| 2176 | TCGAGTGCCTCGGCC | | | | | | |
| | AGATCCGCTCGCTGC | | | | | | |
| | TCATC | | | | | | |
| rs11819 | GTCTTCTACCAACAC | 348 | GTCTTCTACCAACAC | 1778 | 19 | 38496283 | + |
| 2177 | CCGAACCTGATGAGG | | CCGAACCTGATGAGG | | | | |
| | GCGCTGGGCATGCAC | | GCGCTGGGCATGCAC | | | | |
| | GAGAC | | GAGAG | | | | |
| rs11819 | GTCTTCTACCAACAC | 349 | GTCTTCTACCAACAC | 1779 | 19 | 38496283 | + |
| 2177 | CCGAACCTGATGAGG | | CCGAACCTGATGAGG | | | | |
| | GCGCTGGGCATGCAC | | GCGCTGGGCATGCAC | | | | |
| | GAGAC | | GAGAG | | | | |
| rs11819 | AGTCTTCTACCAACA | 350 | | | 19 | 38496283 | + |
| 2177 | CCCGAACCTGATGAG | | | | | | |
| | GGCGCTGGGCATGCA | | | | | | |
| | CGAGA | | | | | | |
| rs11256 | AGACATTGGCTGGAA | 351 | | | 19 | 38499223 | + |
| 3513 | CCCCTGTGGTGGAGA | | | | | | |
| | GCGCTACCTGGACTT | | | | | | |
| | CCTGC | | | | | | |
| rs11256 | AGACATTGGCTGGAA | 352 | | | 19 | 38499223 | + |
| 3513 | CCCCTGTGGTGGAGA | | | | | | |
| | GCGCTACCTGGACTT | | | | | | |
| | CCTGC | | | | | | |
| rs11256 | AGACATTGGCTGGAA | 353 | | | 19 | 38499223 | + |
| 3513 | CCCCTGTGGTGGAGA | | | | | | |
| | GCGCTACCTGGACTT | | | | | | |
| | CCTGC | | | | | | |
| rs19392 | GAGACCCCCTTTCCC | 354 | | | 19 | 38499655 | + |
| 2802 | CATGCGGGTGGCCAG | | | | | | |
| | GCGAGAGCGTGGAGG | | | | | | |
| | AGAAC | | | | | | |
| rs19392 | GAGACCCCCTTTCCC | 355 | | | 19 | 38499655 | + |
| 2802 | CATGCGGGTGGCCAG | | | | | | |
| | GCGAGAGCGTGGAGG | | | | | | |
| | AGAAC | | | | | | |
| rs19392 | GAGACCCCCTTTCCC | 356 | | | 19 | 38499655 | + |
| 2802 | CATGCGGGTGGCCAG | | | | | | |
| | GCGAGAGCGTGGAGG | | | | | | |
| | AGAAC | | | | | | |
| rs19392 | CATGCGGGTGGCCAG | 357 | | | 19 | 38499670 | + |
| 2803 | GCGAGAGCGTGGAGG | | | | | | |
| | AGAACGCCAATGTGG | | | | | | |
| | TGGTG | | | | | | |
| rs19392 | CTCACCCCGCAGGGC | 358 | | | 19 | 38499670 | − |
| 2803 | GGGTCCGAAGCACTC | | | | | | |
| | AGGCTTCCGGATGAG | | | | | | |
| | CAGCC | | | | | | |
| rs19392 | CTCACCCCGCAGGGC | 359 | | | 19 | 38499670 | − |
| 2803 | GGGTCCGAAGCACTC | | | | | | |
| | AGGCTTCCGGATGAG | | | | | | |
| | CAGCC | | | | | | |
| rs19392 | CGCAGGGTCCTCGGA | 360 | CGCAGGGTCCTCGGA | 1780 | 19 | 38499731 | − |
| 2807 | GATGCGGATGGCCTC | | GATGCGGATGGCCTC | | | | |
| | TTCGATGGCAGCCAG | | TTCGATGGCAGCCAG | | | | |
| | CAGCG | | CAGCC | | | | |
| rs19392 | CGCAGGGTCCTCGGA | 361 | CGCAGGGTCCTCGGA | 1781 | 19 | 38499731 | − |
| 2807 | GATGCGGATGGCCTC | | GATGCGGATGGCCTC | | | | |
| | TTCGATGGCAGCCAG | | TTCGATGGCAGCCAG | | | | |
| | CAGCG | | CAGCC | | | | |
| rs19392 | CGGAAGCCTGAGTGC | 362 | CGGAAGCCTGAGTGC | 1782 | 19 | 38499731 | + |
| 2807 | TTCGGACCCGCCCTG | | TTCGGACCCGCCCTG | | | | |
| | CGGGGTGAGGGTGGC | | CGGGGTGAGGGTGGC | | | | |
| | TCAGC | | TCAGG | | | | |
| rs19392 | GGGTCTCACATGCAT | 363 | | | 19 | 38499975 | − |
| 2809 | CTCTGGTGCACAGCG | | | | | | |
| | TCCGAGCAGGTCGAT | | | | | | |
| | CAAGG | | | | | | |
| rs19392 | GGGTCTCACATGCAT | 364 | | | 19 | 38499975 | − |
| 2809 | CTCTGGTGCACAGCG | | | | | | |
| | TCCGAGCAGGTCGAT | | | | | | |
| | CAAGG | | | | | | |
| rs19392 | GGGTCTCACATGCAT | 365 | | | 19 | 38499975 | − |
| 2809 | CTCTGGTGCACAGCG | | | | | | |
| | TCCGAGCAGGTCGAT | | | | | | |
| | CAAGG | | | | | | |
| rs12191 | CCATCCTGCCCTGGC | 366 | | | 19 | 38499993 | − |
| 8593 | TCAGGGTCTCACATG | | | | | | |
| | CATCTCTGGTGCACA | | | | | | |
| | GCGTC | | | | | | |
| rs12191 | ACCTGGGACACGCCA | 367 | | | 19 | 38499993 | + |
| 8593 | TCATGTCCTTCTATG | | | | | | |
| | CCGCCTTGATCGACC | | | | | | |
| | TGCTC | | | | | | |
| rs12191 | ACCTGGGACACGCCA | 368 | | | 19 | 38499993 | + |
| 8593 | TCATGTCCTTCTATG | | | | | | |
| | CCGCCTTGATCGACC | | | | | | |
| | TGCTC | | | | | | |
| rs28933 | GGACACGCCATCATG | 369 | GGACACGCCATCATG | 1783 | 19 | 38499997 | + |
| 396 | TCCTTCTATGCCGCC | | TCCTTCTATGCCGCC | | | | |
| | TTGATCGACCTGCTC | | TTGATCGACCTGCTC | | | | |
| | GGACA | | GGACG | | | | |
| rs28933 | GGACACGCCATCATG | 370 | GGACACGCCATCATG | 1784 | 19 | 38499997 | + |
| 396 | TCCTTCTATGCCGCC | | TCCTTCTATGCCGCC | | | | |
| | TTGATCGACCTGCTC | | TTGATCGACCTGCTC | | | | |
| | GGACA | | GGACG | | | | |
| rs28933 | GGACACGCCATCATG | 371 | GGACACGCCATCATG | 1785 | 19 | 38499997 | + |
| 396 | TCCTTCTATGCCGCC | | TCCTTCTATGCCGCC | | | | |
| | TTGATCGACCTGCTC | | TTGATCGACCTGCTC | | | | |
| | GGACA | | GGACG | | | | |
| rs11819 | TCCCTCCCTCTACTC | 372 | | | 19 | 38500636 | + |
| 2124 | CCCAGCTAATCCAAG | | | | | | |
| | CCGGCAAGGGTGAGG | | | | | | |
| | CCCTG | | | | | | |
| rs11819 | GCCCACAAGGTCCTC | 373 | | | 19 | 38500636 | − |
| 2124 | CAAGGGCACAAGGGA | | | | | | |
| | GCGGAGGATGGCGCG | | | | | | |
| | GATCC | | | | | | |
| rs11819 | GCCCACAAGGTCCTC | 374 | | | 19 | 38500636 | − |
| 2124 | CAAGGGCACAAGGGA | | | | | | |
| | GCGGAGGATGGCGCG | | | | | | |
| | GATCC | | | | | | |
| rs19392 | CCTCTACTCCCCAGC | 375 | | | 19 | 38500642 | + |
| 2816 | TAATCCAAGCCGGCA | | | | | | |
| | AGGGTGAGGCCCTGC | | | | | | |
| | GGATC | | | | | | |
| rs19392 | GATGATGCCCACAAG | 376 | | | 19 | 38500642 | − |
| 2816 | GTCCTCCAAGGGCAC | | | | | | |
| | AAGGGAGCGGAGGAT | | | | | | |
| | GGCGC | | | | | | |
| rs19392 | CCTCTACTCCCCAGC | 377 | | | 19 | 38500642 | + |
| 2816 | TAATCCAAGCCGGCA | | | | | | |
| | AGGGTGAGGCCCTGC | | | | | | |
| | GGATC | | | | | | |
| rs11819 | CTCTACTCCCCAGCT | 378 | | | 19 | 38500643 | + |
| 2122 | AATCCAAGCCGGCAA | | | | | | |
| | GGGTGAGGCCCTGYG | | | | | | |
| | GAYCC | | | | | | |
| rs11819 | CTCTACTCCCCAGCT | 379 | | | 19 | 38500643 | + |
| 2122 | AATCCAAGCCGGCAA | | | | | | |
| | GGGTGAGGCCCTGYG | | | | | | |
| | GAYCC | | | | | | |
| rs11819 | CTCTACTCCCCAGCT | 380 | | | 19 | 38500643 | − |
| 2122 | AATCCAAGCCGGCAA | | | | | | |
| | GGGTGAGGCCCTGCG | | | | | | |
| | GATCC | | | | | | |
| rs28933 | CAGTGGGAGGCTGAT | 381 | | | 19 | 38500654 | − |
| 397 | GATGCCCACAAGGTC | | | | | | |
| | CTCCAAGGGCACAAG | | | | | | |
| | GGAGC | | | | | | |
| rs28933 | CAGTGGGAGGCTGAT | 382 | | | 19 | 38500654 | − |
| 397 | GATGCCCACAAGGTC | | | | | | |
| | CTCCAAGGGCACAAG | | | | | | |
| | GGAGC | | | | | | |
| rs28933 | AGCTAATCCAAGCCG | 383 | | | 19 | 38500654 | + |
| 397 | GCAAGGGTGAGGCCC | | | | | | |
| | TGCGGATCCGCGCCA | | | | | | |
| | TCCTC | | | | | | |
| rs28933 | AGCTAATCCAAGCCG | 384 | | | 19 | 38500654 | + |
| 397 | GCAAGGGTGAGGCCC | | | | | | |
| | TGCGGAYCYRCGCCA | | | | | | |
| | TCCTC | | | | | | |
| rs12191 | GCAGTGGGAGGCTGA | 385 | | | 19 | 38500655 | − |
| 8594 | TGATGCCCACAAGGT | | | | | | |
| | CCTCCAAGGGCACAA | | | | | | |
| | GGGAG | | | | | | |
| rs12191 | GCAGTGGGAGGCTGA | 386 | | | 19 | 38500655 | − |
| 8594 | TGATGCCCACAAGGT | | | | | | |
| | CCTCCAAGGGCACAA | | | | | | |
| | GGGAG | | | | | | |
| rs12191 | CTAATCCAAGCCGGC | 387 | CTAATCCAAGCCGGC | 1786 | 19 | 38500655 | + |
| 8594 | AAGGGTGAGGCCCTG | | AAGGGTGAGGCCCTG | | | | |
| | CGGATCCGCGCCATC | | CGGATCCGCGCCATC | | | | |
| | CTCCA | | CTCCG | | | | |
| rs11819 | ACGTCCAGCACGTGC | 388 | ACGTCCAGCACGTGC | 1787 | 19 | 38500898 | − |
| 2178 | AGCAAGAAGTCCTGG | | AGCAAGAAGTCCTGG | | | | |
| | TTCTCGATGCCATAC | | TTCTCGATGCCATAC | | | | |
| | ACACC | | ACACG | | | | |
| rs11819 | ACGTCCAGCACGTGC | 389 | ACGTCCAGCACGTGC | 1788 | 19 | 38500898 | − |
| 2178 | AGCAAGAAGTCCTGG | | AGCAAGAAGTCCTGG | | | | |
| | TTCTCGATGCCATAC | | TTCTCGATGCCATAC | | | | |
| | ACACC | | ACACG | | | | |
| rs11819 | ACGTCCAGCACGTGC | 390 | ACGTCCAGCACGTGC | 1789 | 19 | 38500898 | − |
| 2178 | AGCAAGAAGTCCTGG | | AGCAAGAAGTCCTGG | | | | |
| | TTCTCGATGCCATAC | | TTCTCGATGCCATAC | | | | |
| | ACACA | | ACACG | | | | |
| rs19392 | AGCATCCTTCGTGCC | 391 | | | 19 | 38500899 | + |
| 2818 | GGACCACAAGGCRTC | | | | | | |
| | CATGGTGCTCTTCCT | | | | | | |
| | GGACC | | | | | | |
| rs19392 | AGCATCCTTCGTGCC | 392 | | | 19 | 38500899 | + |
| 2818 | GGACCACAAGGCGTC | | | | | | |
| | CATGGTGCTCTTCCT | | | | | | |
| | GGACC | | | | | | |
| rs19392 | AGCATCCTTCGTGCC | 393 | | | 19 | 38500899 | + |
| 2818 | GGACCACAAGGCGTC | | | | | | |
| | CATGGTGCTCTTCCT | | | | | | |
| | GGACC | | | | | | |
| rs19392 | TCGTGAAGGCTGGCC | 394 | | | 19 | 38512321 | + |
| 2832 | TCCGCTCCTTCTTCG | | | | | | |
| | AGAGTGCCTCGGAGG | | | | | | |
| | ACATC | | | | | | |
| rs19392 | TCGTGAAGGCTGGCC | 395 | | | 19 | 38512321 | + |
| 2832 | TCCGCTCCTTCTTCG | | | | | | |
| | AGAGTGCCTCGGAGG | | | | | | |
| | ACATC | | | | | | |
| rs19392 | CGGGAACCAGCAGAG | 396 | | | 19 | 38543832 | + |
| 2843 | CCTGGCGCACAGTCG | | | | | | |
| | CCTATGGGACGCAGT | | | | | | |
| | GGTGG | | | | | | |
| rs19392 | CGGGAACCAGCAGAG | 397 | | | 19 | 38543832 | + |
| 2843 | CCTGGCGCACAGTCG | | | | | | |
| | CCTATGGGACGCAGT | | | | | | |
| | GGTGG | | | | | | |
| rs19392 | CTCGAACCTGAGCGA | 398 | | | 19 | 38543832 | − |
| 2843 | GCTTCATCATCATGT | | | | | | |
| | GGGCGAACACGTGCA | | | | | | |
| | GGAAT | | | | | | |
| rs11819 | GGGCAGCAAAGAAGA | 399 | | | 19 | 38580004 | − |
| 2167 | AGTTGTTGTAGTGTC | | | | | | |
| | CCAAGAGGGACATCA | | | | | | |
| | CCATA | | | | | | |
| rs11819 | CCTGACCCCTGGCCC | 400 | | | 19 | 38580004 | + |
| 2167 | TGTGTGCCCACAGTC | | | | | | |
| | CTTCCTGTACCTGGG | | | | | | |
| | CTGGT | | | | | | |
| rs12191 | CAGGTCCTCCCCACA | 401 | | | 19 | 38580094 | − |
| 8595 | CCTGTTTCCCATTGT | | | | | | |
| | GGGTGACAGAGGACA | | | | | | |
| | GGATG | | | | | | |
| rs12191 | CAGGTCCTCCCCACA | 402 | | | 19 | 38580094 | − |
| 8595 | CCTGTTTCCCATTGT | | | | | | |
| | GGGTGACAGAGGACA | | | | | | |
| | GGATG | | | | | | |
| rs19392 | ACATCGCCATGGGGG | 403 | | | 19 | 38580114 | + |
| 2876 | TCAAGACGCTGCGCA | | | | | | |
| | YCATCCTGTCCTCTG | | | | | | |
| | TCACC | | | | | | |
| rs19392 | ACATCGCCATGGGGG | 404 | | | 19 | 38580114 | + |
| 2876 | TCAAGACGCTGCGCA | | | | | | |
| | YCATCCTGTCCTCTG | | | | | | |
| | TCACC | | | | | | |
| rs19392 | ACATCGCCATGGGGG | 405 | | | 19 | 38580114 | + |
| 2876 | TCAAGACGCTGCGCA | | | | | | |
| | CCATCCTGTCCTCTG | | | | | | |
| | TCACC | | | | | | |
| rs19392 | ACGGTGTACAGGTAG | 406 | ACGGTGTACAGGTAG | 1790 | 19 | 38580370 | − |
| 2878 | ACGACCACCGCCAGA | | ACGACCACCGCCAGA | | | | |
| | AGGCCCACGGTCATC | | AGGCCCACGGTCATC | | | | |
| | ACCAC | | ACCAG | | | | |
| rs19392 | ACGGTGTACAGGTAG | 407 | ACGGTGTACAGGTAG | 1791 | 19 | 38580370 | − |
| 2878 | ACGACCACCGCCAGA | | ACGACCACCGCCAGA | | | | |
| | AGGCCCACGGTCATC | | AGGCCCACGGTCATC | | | | |
| | ACCAC | | ACCAG | | | | |
| rs19392 | ACGGTGTACAGGTAG | 408 | ACGGTGTACAGGTAG | 1792 | 19 | 38580370 | − |
| 2878 | ACGACCACCGCCAGA | | ACGACCACCGCCAGA | | | | |
| | AGGCCCACGGTCATC | | AGGCCCACGGTCATC | | | | |
| | ACCAC | | ACCAG | | | | |
| rs11819 | CCCCATCCTGCCCCC | 409 | | | 19 | 38580403 | + |
| 2168 | AGCTGGTGATGACCG | | | | | | |
| | TGGGCCTTCTGGCGG | | | | | | |
| | TGGTC | | | | | | |
| rs11819 | CCCCATCCTGCCCCC | 410 | | | 19 | 38580403 | + |
| 2168 | AGCTGGTGATGACCG | | | | | | |
| | TGGGCCTTCTGGCGG | | | | | | |
| | TGGTC | | | | | | |
| rs11819 | TCAGTGTTACCTGTT | 411 | | | 19 | 38584989 | + |
| 2170 | TCACATGTACGTGGG | | | | | | |
| | TGTCCGGGCTGGCGG | | | | | | |
| | AGGCA | | | | | | |
| rs11819 | TCAGTGTTACCTGTT | 412 | | | 19 | 38584989 | + |
| 2170 | TCACATGTACGTGGG | | | | | | |
| | TGTCCGGGCTGGCGG | | | | | | |
| | AGGCA | | | | | | |
| rs11819 | CCCTGTAGAGCTCGT | 413 | | | 19 | 38584989 | − |
| 2170 | ATTCGTCACCCGCGG | | | | | | |
| | GGTCCTCGATCTCGT | | | | | | |
| | CCCCA | | | | | | |
| rs11819 | GGTGGACCATGCACC | 414 | | | 19 | 38934851 | + |
| 2161 | CAGCCTCCAAGCAGA | | | | | | |
| | GGTCTGAAGGAGAAA | | | | | | |
| | AGGTC | | | | | | |
| rs11819 | GGCAGGTTGCTCACT | 415 | GGCAGGTTGCTCACT | 1793 | 19 | 38942490 | − |
| 2116 | TGATGAACTGGTTGT | | TGATGAACTGGTTGT | | | | |
| | ATAGGCCATTGGTGC | | ATAGGCCATTGGTGC | | | | |
| | TGTGG | | TGTGC | | | | |
| rs14433 | GCTTGCTGACCAGCC | 416 | | | 19 | 38946112 | − |
| 6148 | AGTCCAAGTTTGTGG | | | | | | |
| | AGAAGAGGGCACAGT | | | | | | |
| | TGCTA | | | | | | |
| rs11819 | CGTCCTCCGTGGAAG | 417 | | | 19 | 38985204 | + |
| 2175 | ACACCATGAGCCTGC | | | | | | |
| | TCGAGTGCCTCGGCC | | | | | | |
| | AGATC | | | | | | |
| rs11819 | CGTCCTCCGTGGAAG | 418 | | | 19 | 38985204 | + |
| 2175 | ACACCATGAGCCTGC | | | | | | |
| | TCGAGTGCCTCGGCC | | | | | | |
| | AGATC | | | | | | |
| rs11256 | AGACATTGGCTGGAA | 419 | | | 19 | 38989863 | + |
| 3513 | CCCCTGTGGTGGAGA | | | | | | |
| | GCGCTACCTGGACTT | | | | | | |
| | CCTGC | | | | | | |
| rs12191 | GCTCATGAGACCCCC | 420 | | | 19 | 38990286 | + |
| 8596 | TTTCCCCATGCGGGT | | | | | | |
| | GGCCAGGCGAGAGCG | | | | | | |
| | TGGAG | | | | | | |
| rs12191 | GCTCATGAGACCCCC | 421 | | | 19 | 38990286 | + |
| 8596 | TTTCCCCATGCGGGT | | | | | | |
| | GGCCAGGCGAGAGCG | | | | | | |
| | TGGAG | | | | | | |
| rs12191 | GCTCATGAGACCCCC | 422 | | | 19 | 38990286 | + |
| 8596 | TTTCCCCATGCGGGT | | | | | | |
| | GGCCAGGCGAGAGCG | | | | | | |
| | TGGAG | | | | | | |
| rs11819 | TGATGATGCCCACAA | 423 | | | 19 | 38991283 | − |
| 2122 | GGTCCTCCAAGGGCA | | | | | | |
| | CAAGGGAGCGGAGGA | | | | | | |
| | TGGCG | | | | | | |
| rs19392 | TCGTGAAGGCTGGCC | 424 | | | 19 | 39002961 | + |
| 2832 | TCCGCTCCTTCTTCG | | | | | | |
| | AGAGTGCCTCGGAGG | | | | | | |
| | ACATC | | | | | | |
| rs11819 | GGGCAGCAAAGAAGA | 425 | | | 19 | 39070644 | − |
| 2167 | AGTTGTTGTAGTGTC | | | | | | |
| | CCAAGAGGGACATCA | | | | | | |
| | CCATA | | | | | | |
| rs11819 | GGGCAGCAAAGAAGA | 426 | | | 19 | 39070644 | − |
| 2167 | AGTTGTTGTAGTGTC | | | | | | |
| | CCAAGAGGGACATCA | | | | | | |
| | CCATA | | | | | | |
| rs12191 | CAGGTCCTCCCCACA | 427 | | | 19 | 39070734 | − |
| 8595 | CCTGTTTCCCATTGT | | | | | | |
| | GGGTGACAGAGGACA | | | | | | |
| | GGATG | | | | | | |
| rs11819 | CCCCATCCTGCCCCC | 428 | | | 19 | 39071043 | + |
| 2168 | AGCTGGTGATGACCG | | | | | | |
| | TGGGCCTTCTGGCGG | | | | | | |
| | TGGTC | | | | | | |
| rs63749 | CACACTTCATGTCAG | 429 | | | 19 | 39071080 | − |
| 869 | GTTCATCCTCATCCT | | | | | | |
| | CGCTCTTGTTGTAGA | | | | | | |
| | ACTTG | | | | | | |
| rs63749 | CACACTTCATGTCAG | 430 | | | 19 | 39071080 | − |
| 869 | GTTCATCCTCATCCT | | | | | | |
| | CGCTCTTGTTGTAGA | | | | | | |
| | ACTTG | | | | | | |
| rs63749 | CACACTTCATGTCAG | 431 | | | 19 | 39071080 | − |
| 869 | GTTCATCCTCATCCT | | | | | | |
| | CGCTCTTGTTGTAGA | | | | | | |
| | ACTTG | | | | | | |
| rs12979 | GGGCGAGGGGCTTTG | 432 | | | 19 | 39248147 | − |
| 860 | CTGGGGGAGCGCGGA | | | | | | |
| | GTGCAATTCAACCCT | | | | | | |
| | GGTTC | | | | | | |
| rs12979 | GGGCGAGGGGCTTTG | 433 | | | 19 | 39248147 | − |
| 860 | CTGGGGGAGCGCGGA | | | | | | |
| | GTGCAATTCAACCCT | | | | | | |
| | GGTTC | | | | | | |
| rs12979 | GGGCGAGGGGCTTTG | 434 | | | 19 | 39248147 | − |
| 860 | CTGGGGGAGCGCGGA | | | | | | |
| | GTGCAATTCAACCCT | | | | | | |
| | GGTTC | | | | | | |
| rs34223 | CAGCCTCCAACTGGG | 435 | | | 19 | 40991224 | − |
| 104 | CCTTTTATCCTGACC | | | | | | |
| | CTGCCTCTGCACCCT | | | | | | |
| | GTTAT | | | | | | |
| rs34223 | CAGCCTCCAACTGGG | 436 | | | 19 | 40991224 | − |
| 104 | CCTTTTATCCTGACC | | | | | | |
| | CTGCCTCTGCACCCT | | | | | | |
| | GTTAT | | | | | | |
| rs34223 | CAGCCTCCAACTGGG | 437 | | | 19 | 40991224 | − |
| 104 | CCTTTTATCCTGACC | | | | | | |
| | CTGCCTCTGCACCCT | | | | | | |
| | GTTAT | | | | | | |
| rs81927 | GGGCAGAGGGCGGGG | 438 | | | 19 | 40991369 | − |
| 09 | CCCTGGTGGGAGGCG | | | | | | |
| | GYCATGRGWGTTAGG | | | | | | |
| | GTGGC | | | | | | |
| rs81927 | GGGCAGAGGGCGGGG | 439 | | | 19 | 40991369 | − |
| 09 | CCCTGGTGGGAGGCG | | | | | | |
| | GYCATGRGWGTTAGG | | | | | | |
| | GTGGC | | | | | | |
| rs81927 | GGGCAGAGGGCGGGG | 440 | | | 19 | 40991369 | − |
| 09 | CCCTGGTGGGAGGCG | | | | | | |
| | GTCATGGGTGTTAGG | | | | | | |
| | GTGGC | | | | | | |
| rs33973 | TGCACTCCTCACAGG | 441 | TGCACTCCTCACAGG | 1794 | 19 | 40991381 | + |
| 337 | ACTCTTGCTACTCCT | | ACTCTTGCTACTCCT | | | | |
| | GGTTCAGCGCCACCC | | GGTTCAGCGCCACCC | | | | |
| | TAACA | | TAACT | | | | |
| rs33973 | TGCACTCCTCACAGG | 442 | TGCACTCCTCACAGG | 1795 | 19 | 40991381 | + |
| 337 | ACTCTTGCTACTCCT | | ACTCTTGCTACTCCT | | | | |
| | GGTTCAGCGCCACCC | | GGTTCAGCGCCACCC | | | | |
| | TAACA | | TAACT | | | | |
| rs33973 | TGCACTCCTCACAGG | 443 | TGCACTCCTCACAGG | 1796 | 19 | 40991381 | + |
| 337 | ACTCTTGCTACTCCT | | ACTCTTGCTACTCCT | | | | |
| | GGTTCAGCGCCACCC | | GGTTCAGCGCCACCC | | | | |
| | TAACA | | TAACT | | | | |
| rs33980 | GCAGAAGGTTTCCCA | 444 | | | 19 | 40991388 | − |
| 385 | AAAGGGGCAGAGGGC | | | | | | |
| | GGGGCCCTGGTGGGA | | | | | | |
| | GGSKG | | | | | | |
| rs33980 | CAGAAGGTTTCCCAA | 445 | CAGAAGGTTTCCCAA | 1797 | 19 | 40991388 | − |
| 385 | AAGGGGCAGAGGGCG | | AAGGGGCAGAGGGCG | | | | |
| | GGGCCCTGGTGGGAG | | GGGCCCTGGTGGGAG | | | | |
| | GSKGT | | GSKGC | | | | |
| rs33980 | ACAGGACTCTTGCTA | 446 | ACAGGACTCTTGCTA | 1798 | 19 | 40991388 | + |
| 385 | CTCCTGGTTCAGCGC | | CTCCTGGTTCAGCGC | | | | |
| | CACCCTAACWCYCAT | | CACCCTAACWCYCAT | | | | |
| | GRCCG | | GGCAC | | | | |
| rs33926 | TGCAGAAGGTTTCCC | 447 | TGCAGAAGGTTTCCC | 1799 | 19 | 40991390 | − |
| 104 | AAAAGGGGCAGAGGG | | AAAAGGGGCAGAGGG | | | | |
| | CGGGGCCCTGGTGGG | | CGGGGCCCTGGTGGG | | | | |
| | AGGST | | AGGSG | | | | |
| rs33926 | TGCAGAAGGTTTCCC | 448 | TGCAGAAGGTTTCCC | 1800 | 19 | 40991390 | − |
| 104 | AAAAGGGGCAGAGGG | | AAAAGGGGCAGAGGG | | | | |
| | CGGGGCCCTGGTGGG | | CGGGGCCCTGGTGGG | | | | |
| | AGGBT | | AGGBG | | | | |
| rs33926 | TGCAGAAGGTTTCCC | 449 | TGCAGAAGGTTTCCC | 1801 | 19 | 40991390 | − |
| 104 | AAAAGGGGCAGAGGG | | AAAAGGGGCAGAGGG | | | | |
| | CGGGGCCCTGGTGGG | | CGGGGCCCTGGTGGG | | | | |
| | AGGBT | | AGGBG | | | | |
| rs34284 | ACAGGACTCTTGCTA | 450 | ACAGGACTCTTGCTA | 1802 | 19 | 40991391 | + |
| 776 | CTCCTGGTTCAGCGC | | CTCCTGGTTCAGCGC | | | | |
| | CACCCTAACACCCAT | | CACCCTAACACCCAT | | | | |
| | GACCG | | GACCC | | | | |
| rs34284 | CTGCAGAAGGTTTCC | 451 | CTGCAGAAGGTTTCC | 1803 | 19 | 40991391 | − |
| 776 | CAAAAGGGGCAGAGG | | CAAAAGGGGCAGAGG | | | | |
| | GCGGGGCCCTGGTGG | | GCGGGGCCCTGGTGG | | | | |
| | GAGGC | | GAGGG | | | | |
| rs34284 | CTGCAGAAGGTTTCC | 452 | CTGCAGAAGGTTTCC | 1804 | 19 | 40991391 | − |
| 776 | CAAAAGGGGCAGAGG | | CAAAAGGGGCAGAGG | | | | |
| | GCGGGGCCCTGGTGG | | GCGGGGCCCTGGTGG | | | | |
| | GAGGC | | GAGGG | | | | |
| rs35303 | CGTCTGTGTCTTACC | 453 | CGTCTGTGTCTTACC | 1805 | 19 | 40991441 | − |
| 484 | CTCAGAAAGGATTTG | | CTCAGAAAGGATTTG | | | | |
| | AGTAGGCCTCTTCTA | | AGTAGGCCTCTTCTA | | | | |
| | TCCAT | | TCCAC | | | | |
| rs35303 | CGTCTGTGTCTTACC | 454 | CGTCTGTGTCTTACC | 1806 | 19 | 40991441 | − |
| 484 | CTCAGAAAGGATTTG | | CTCAGAAAGGATTTG | | | | |
| | AGTAGGCCTCTTCTA | | AGTAGGCCTCTTCTA | | | | |
| | TCCAT | | TCCAC | | | | |
| rs35303 | CGTCTGTGTCTTACC | 455 | CGTCTGTGTCTTACC | 1807 | 19 | 40991441 | − |
| 484 | CTCAGAAAGGATTTG | | CTCAGAAAGGATTTG | | | | |
| | AGTAGGCCTCTTCTA | | AGTAGGCCTCTTCTA | | | | |
| | TCCAT | | TCCAC | | | | |
| rs28186 | CTAACAGCCACCCCT | 456 | CTAACAGCCACCCCT | 1808 | 19 | 41004015 | + |
| 4907 | GGTGTGGATGTGATT | | GGTGTGGATGTGATT | | | | |
| | GGCAGTTCCGAGAGA | | GGCAGTTCCGAGAGA | | | | |
| | AATAA | | AATAT | | | | |
| rs28186 | CTAACAGCCACCCCT | 457 | CTAACAGCCACCCCT | 1809 | 19 | 41004015 | + |
| 4907 | GGTGTGGATGTGATT | | GGTGTGGATGTGATT | | | | |
| | GGCAGTTCCGAGAGA | | GGCAGTTCCGAGAGA | | | | |
| | AATAA | | AATAT | | | | |
| rs28186 | CTAACAGCCACCCCT | 458 | CTAACAGCCACCCCT | 1810 | 19 | 41004015 | + |
| 4907 | GGTGTGGATGTGATT | | GGTGTGGATGTGATT | | | | |
| | GGCAGTTCCGAGAGA | | GGCAGTTCCGAGAGA | | | | |
| | AATAA | | AATAT | | | | |
| rs14265 | TGGTGTGGATGTGAT | 459 | | | 19 | 41004030 | + |
| 7251 | TGGCAGTTCCGAGAG | | | | | | |
| | AAATAWGGGGACGTC | | | | | | |
| | TTCAC | | | | | | |
| rs14265 | TGGTGTGGATGTGAT | 460 | | | 19 | 41004030 | + |
| 7251 | TGGCAGTTCCGAGAG | | | | | | |
| | AAATATGGGGACGTC | | | | | | |
| | TTCAC | | | | | | |
| rs14265 | TGGTGTGGATGTGAT | 461 | | | 19 | 41004030 | + |
| 7251 | TGGCAGTTCCGAGAG | | | | | | |
| | AAATATGGGGACGTC | | | | | | |
| | TTCAC | | | | | | |
| rs14940 | TCGACCATGGCGATT | 462 | | | 19 | 41004093 | − |
| 3002 | TTTCCCCGGCCAGAG | | | | | | |
| | AAGGCCTCAGCCTTG | | | | | | |
| | TCCAC | | | | | | |
| rs14940 | TCGACCATGGCGATT | 463 | | | 19 | 41004093 | − |
| 3002 | TTTCCCCGGCCAGAG | | | | | | |
| | AAGGCCTCAGCCTTG | | | | | | |
| | TCCAC | | | | | | |
| rs36060 | TGAGGCTCTCACCAT | 464 | | | 19 | 41004125 | − |
| 847 | ATCCCCGGAAGAATG | | | | | | |
| | GGTCGACCATGGCGA | | | | | | |
| | TTTTT | | | | | | |
| rs36060 | TGAGGCTCTCACCAT | 465 | | | 19 | 41004125 | − |
| 847 | ATCCCCGGAAGAATG | | | | | | |
| | GGTCGACCATGGCGA | | | | | | |
| | TTTTT | | | | | | |
| rs36060 | TGAGGCTCTCACCAT | 466 | | | 19 | 41004125 | − |
| 847 | ATCCCCGGAAGAATG | | | | | | |
| | GGTCGACCATGGCGA | | | | | | |
| | TTTTT | | | | | | |
| rs18633 | GGCCTTCTCTGGCCG | 467 | | | 19 | 41004158 | + |
| 5453 | GGGAAAAATCGCCAT | | | | | | |
| | GGTCGACCCATTCTT | | | | | | |
| | CCGGG | | | | | | |
| rs18633 | GCCTTCTCTGGCCGG | 468 | GCCTTCTCTGGCCGG | 1811 | 19 | 41004158 | + |
| 5453 | GGAAAAATCGCCATG | | GGAAAAATCGCCATG | | | | |
| | GTCGACCCATTCTTC | | GTCGACCCATTCTTC | | | | |
| | CRGGT | | CRGGG | | | | |
| rs18633 | GCCTTCTCTGGCCGG | 469 | GCCTTCTCTGGCCGG | 1812 | 19 | 41004158 | + |
| 5453 | GGAAAAATCGCCATG | | GGAAAAATCGCCATG | | | | |
| | GTCGACCCATTCTTC | | GTCGACCCATTCTTC | | | | |
| | CRGGT | | CRGGG | | | | |
| rs13980 | TCCAACTTCTTCTAC | 470 | | | 19 | 41004303 | + |
| 1276 | AACCAACCCACACCT | | | | | | |
| | SCCCTGCACCCCAGG | | | | | | |
| | TGTGA | | | | | | |
| rs13980 | TCCAACTTCTTCTAC | 471 | | | 19 | 41004303 | − |
| 1276 | AACCAACCCACACCT | | | | | | |
| | SCCCTGCACCCCAGG | | | | | | |
| | TGTGA | | | | | | |
| rs13980 | GGTCACAGAGAATCG | 472 | GGTCACAGAGAATCG | 1813 | 19 | 41004303 | − |
| 1276 | CCGAAGCACCTTCCA | | CCGAAGCACCTTCCA | | | | |
| | GCGGTTTCCATTGGC | | GCGGTTTCCATTGGC | | | | |
| | AAAGA | | AAAGG | | | | |
| rs12721 | AGGTGCTTCGGCGAT | 473 | | | 19 | 41004377 | + |
| 655 | TCTCTGTGACCACTA | | | | | | |
| | TGAGGGACTTCGGGA | | | | | | |
| | TGGGA | | | | | | |
| rs12721 | AGGTGCTTCGGCGAT | 474 | | | 19 | 41004377 | + |
| 655 | TCTCTGTGACCACTA | | | | | | |
| | TGAGGGACTTCGGGA | | | | | | |
| | TGGGA | | | | | | |
| rs12721 | AGGTGCTTCGGCGAT | 475 | | | 19 | 41004377 | + |
| 655 | TCTCTGTGACCACTA | | | | | | |
| | TGAGGGACTTCGGGA | | | | | | |
| | TGGGA | | | | | | |
| rs14588 | AGGACTCACCCTTGG | 476 | AGGACTCACCCTTGG | 1814 | 19 | 41004406 | − |
| 4402 | ATTTCCGAAGCTCCT | | ATTTCCGAAGCTCCT | | | | |
| | CTATCAGACACTGAG | | CTATCAGACACTGAG | | | | |
| | CCTCA | | CCTCC | | | | |
| rs14588 | AGGACTCACCCTTGG | 477 | AGGACTCACCCTTGG | 1815 | 19 | 41004406 | − |
| 4402 | ATTTCCGAAGCTCCT | | ATTTCCGAAGCTCCT | | | | |
| | CTATCAGACACTGAG | | CTATCAGACACTGAG | | | | |
| | CCTCA | | CCTCC | | | | |
| rs14588 | AGGACTCACCCTTGG | 478 | AGGACTCACCCTTGG | 1816 | 19 | 41004406 | − |
| 4402 | ATTTCCGAAGCTCCT | | ATTTCCGAAGCTCCT | | | | |
| | CTATCAGACACTGAG | | CTATCAGACACTGAG | | | | |
| | CCTCA | | CCTCC | | | | |
| rs13865 | CTTTCTTTCCTATTC | 479 | | | 19 | 41004427 | − |
| 2715 | ATCCCCCAGGACTCA | | | | | | |
| | CCCTTGGATTTCCGA | | | | | | |
| | AGYTC | | | | | | |
| rs13865 | CTTTCTTTCCTATTC | 480 | | | 19 | 41004427 | − |
| 2715 | ATCCCCCAGGACTCA | | | | | | |
| | CCCTTGGATTTCCGA | | | | | | |
| | AGCTC | | | | | | |
| rs13865 | CTTTCTTTCCTATTC | 481 | | | 19 | 41004427 | − |
| 2715 | ATCCCCCAGGACTCA | | | | | | |
| | CCCTTGGATTTCCGA | | | | | | |
| | AGCTC | | | | | | |
| rs38267 | TCAGTCTGTGTCCTT | 482 | TCAGTCTGTGTCCTT | 1817 | 19 | 41006919 | + |
| 11 | GACCTGCTGCTTCTT | | GACCTGCTGCTTCTT | | | | |
| | CCTAGGGGCCCTCAT | | CCTAGGGGCCCTCAT | | | | |
| | GGACC | | GGACG | | | | |
| rs38267 | TCAGTCTGTGTCCTT | 483 | TCAGTCTGTGTCCTT | 1818 | 19 | 41006919 | + |
| 11 | GACCTGCTGCTTCTT | | GACCTGCTGCTTCTT | | | | |
| | CCTAGGGGCCCTCAT | | CCTAGGGGCCCTCAT | | | | |
| | GGACC | | GGACG | | | | |
| rs38267 | TCAGTCTGTGTCCTT | 484 | TCAGTCTGTGTCCTT | 1819 | 19 | 41006919 | + |
| 11 | GACCTGCTGCTTCTT | | GACCTGCTGCTTCTT | | | | |
| | CCTAGGGGCCCTCAT | | CCTAGGGGCCCTCAT | | | | |
| | GGACC | | GGACG | | | | |
| rs36056 | GTCTGTGTCCTTGAC | 485 | | | 19 | 41006923 | + |
| 539 | CTGCTGCTTCTTCCT | | | | | | |
| | AGGGGCCCTCATGGA | | | | | | |
| | CCCCA | | | | | | |
| rs36056 | GTCTGTGTCCTTGAC | 486 | | | 19 | 41006923 | + |
| 539 | CTGCTGCTTCTTCCT | | | | | | |
| | AGGGGCCCTCATGGA | | | | | | |
| | CCCCA | | | | | | |
| rs36056 | GTCTGTGTCCTTGAC | 487 | | | 19 | 41006923 | + |
| 539 | CTGCTGCTTCTTCCT | | | | | | |
| | AGGGGCCCTCATGGA | | | | | | |
| | CCCCA | | | | | | |
| rs37452 | ACCTGCTGCTTCTTC | 488 | | | 19 | 41006936 | + |
| 74 | CTAtGgGCCCTCaTG | | | | | | |
| | GACCCCACCTTCCTC | | | | | | |
| | TTCCA | | | | | | |
| rs37452 | ACCTGCaGCTTCTTC | 489 | | | 19 | 41006936 | + |
| 74 | CTAtGgGCCCTCaTG | | | | | | |
| | GACCaCACCTTCCTC | | | | | | |
| | TTCCA | | | | | | |
| rs37452 | GGAATCGTTTTCCAA | 490 | GGAATCGTTTTCCAA | 1820 | 19 | 41006936 | − |
| 74 | AGACGATGGAGCAGA | | AGACGATGGAGCAGA | | | | |
| | TGATGTTGGCGGTAA | | TGATGTTGGCGGTAA | | | | |
| | TGGAA | | TGGAC | | | | |
| rs37348 | TCAGCATCTTCAGGA | 491 | | | 19 | 41006968 | − |
| 9637 | ACTCTTGATCTTGGT | | | | | | |
| | AGTGGAATCGTTTTC | | | | | | |
| | CAAAG | | | | | | |
| rs37348 | CAGCATCTTCAGGAA | 492 | CAGCATCTTCAGGAA | 1821 | 19 | 41006968 | − |
| 9637 | CTCTTGATCTTGGTA | | CTCTTGATCTTGGTA | | | | |
| | GTGGAATCGTTTTCC | | GTGGAATCGTTTTCC | | | | |
| | AAAGA | | AAAGC | | | | |
| rs37348 | CAGCATCTTCAGGAA | 493 | CAGCATCTTCAGGAA | 1822 | 19 | 41006968 | − |
| 9637 | CTCTTGATCTTGGTA | | CTCTTGATCTTGGTA | | | | |
| | GTGGAAKCGTTTTCC | | GTGGAAKCGTTTTCC | | | | |
| | RAAGA | | RAAGC | | | | |
| rs36079 | GGCCGAATACAGAGC | 494 | | | 19 | 41007013 | − |
| 186 | TGATGAGTGAAAAAG | | | | | | |
| | TCTGGTAGAACAAGT | | | | | | |
| | TCAGC | | | | | | |
| rs36079 | GGCCGAATACAGAGC | 495 | | | 19 | 41007013 | − |
| 186 | TGATGAGTGAAAAAG | | | | | | |
| | TCTGGTAGAACAAGT | | | | | | |
| | TCAGC | | | | | | |
| rs36079 | GGCCGAATACAGAGC | 496 | | | 19 | 41007013 | − |
| 186 | TGATGAGTGAAAAAG | | | | | | |
| | TCTGGTAGAACAAGT | | | | | | |
| | TCAGC | | | | | | |
| rs22793 | TCCCAGACCCCACTT | 497 | | | 19 | 41009358 | − |
| 43 | TTTCCATGTGGAGCA | | | | | | |
| | GGTAGGTGTCGATGA | | | | | | |
| | GGTCC | | | | | | |
| rs22793 | TCCCAGACCCCACTT | 498 | | | 19 | 41009358 | − |
| 43 | TTTCCATGTGGAGCA | | | | | | |
| | GGTAGGTGTCGATGA | | | | | | |
| | GGTCC | | | | | | |
| rs22793 | TCCCAGACCCCACTT | 499 | | | 19 | 41009358 | − |
| 43 | TTTCCATGTGGAGCA | | | | | | |
| | GGTAGGTGTCGATGA | | | | | | |
| | GGTCC | | | | | | |
| rs13902 | CCCTGACCCTCCCCT | 500 | CCCTGACCCTCCCCT | 1823 | 19 | 41010006 | + |
| 9625 | TCCTTCCCTACTGTG | | TCCTTCCCTACTGTG | | | | |
| | GACGCAGGAGAAATC | | GACGCAGGAGAAATC | | | | |
| | CAACC | | CAACG | | | | |
| rs34698 | CTCAACACGCTCTCG | 501 | CTCAACACGCTCTCG | 1824 | 19 | 41010088 | − |
| 757 | CTCTTCTTTGCTGGC | | CTCTTCTTTGCTGGC | | | | |
| | ACTGAGACCACCAGC | | ACTGAGACCACCAGC | | | | |
| | ACCAG | | ACCAC | | | | |
| rs34698 | CTCAACACGCTCTCG | 502 | CTCAACACGCTCTCG | 1825 | 19 | 41010088 | + |
| 757 | CTCTTCTTTGCTGGC | | CTCTTCTTTGCTGGC | | | | |
| | ACTGAGACCACCAGC | | ACTGAGACCACCAGC | | | | |
| | ACCAG | | ACCAC | | | | |
| rs34698 | ACCTGCAACATGAGG | 503 | ACCTGCAACATGAGG | 1826 | 19 | 41010088 | − |
| 757 | GTATTTGAGCATGAG | | GTATTTGAGCATGAG | | | | |
| | CAGGAAGCCGTAGCG | | CAGGAAGCCGTAGCG | | | | |
| | GAGAC | | GAGAG | | | | |
| rs28399 | AATGAGATTCATTGG | 504 | | | 19 | 41012316 | + |
| 499 | TCTTCTTTTCTGTAC | | | | | | |
| | AGAGAGAGTCTACAG | | | | | | |
| | GGAGA | | | | | | |
| rs28399 | ATGAGATTCATTGGT | 505 | ATGAGATTCATTGGT | 1827 | 19 | 41012316 | + |
| 499 | CTTCTTTTCTGTACA | | CTTCTTTTCTGTACA | | | | |
| | GAGAGAGTCTACAGG | | GAGAGAGTCTACAGG | | | | |
| | GAGAT | | GAGAC | | | | |
| rs34826 | TCTGTACAGAGAGAG | 506 | | | 19 | 41012339 | + |
| 503 | TCTACAGGGAGATTG | | | | | | |
| | AACAGGTGATTGGCC | | | | | | |
| | CACAT | | | | | | |
| rs34826 | TCTGTACAGAGAGAG | 507 | | | 19 | 41012339 | + |
| 503 | TCTACAGGGAGATTG | | | | | | |
| | AACAGGTGATTGGCC | | | | | | |
| | CACAT | | | | | | |
| rs34826 | TCTGTACAGAGAGAG | 508 | | | 19 | 41012339 | + |
| 503 | TCTACAGGGAGATTG | | | | | | |
| | AACAGGTGATTGGCC | | | | | | |
| | CACAT | | | | | | |
| rs34097 | GGAGGGCTATGGGGT | 509 | | | 19 | 41012465 | − |
| 093 | TCCAGCCGGTCTTAC | | | | | | |
| | CTTGGGGATGATGTA | | | | | | |
| | CCCTC | | | | | | |
| rs34097 | GGAGGGCTATGGGGT | 510 | | | 19 | 41012465 | − |
| 093 | TCCAGCCGGTCTTAC | | | | | | |
| | CTTGGGGATGATGTA | | | | | | |
| | CCCTC | | | | | | |
| rs34097 | GGAGGGCTATGGGGT | 511 | | | 19 | 41012465 | − |
| 093 | TCCAGCCGGTCTTAC | | | | | | |
| | CTTGGGGATGATGTA | | | | | | |
| | CCCTC | | | | | | |
| rs35979 | ATATCTTTTGATCTT | 512 | ATATCTTTTGATCTT | 1828 | 19 | 41012693 | + |
| 566 | GTGATCCTCCCTCAG | | GTGATCCTCCCTCAG | | | | |
| | GACACAGAAGTATTT | | GACACAGAAGTATTT | | | | |
| | CTCAA | | CTCAT | | | | |
| rs35979 | ATATCTTTTGATCTT | 513 | ATATCTTTTGATCTT | 1829 | 19 | 41012693 | + |
| 566 | GTGATCCTCYCTCAG | | GTGATCCTCYCTCAG | | | | |
| | GACACAGAAGTATTT | | GACACAGAAGTATTT | | | | |
| | CTCAA | | CTCAT | | | | |
| rs35979 | ATATCTTTTGATCTT | 514 | ATATCTTTTGATCTT | 1830 | 19 | 41012693 | + |
| 566 | GTGATCCTCYCTCAG | | GTGATCCTCYCTCAG | | | | |
| | GACACAGAAGTATTT | | GACACAGAAGTATTT | | | | |
| | CTCAA | | CTCAT | | | | |
| rs56408 | GCCAGCCCCGTGGCC | 515 | GCCAGCCCCGTGGCC | 1831 | 19 | 41016778 | + |
| 3989 | CCAGAAGACATCGAT | | CCAGAAGACATCGAT | | | | |
| | CTGACACCCCAGGAG | | CTGACACCCCAGGAG | | | | |
| | TGTGA | | TGTGG | | | | |
| rs56408 | GCCAGCCCCGTGGCC | 516 | GCCAGCCCCGTGGCC | 1832 | 19 | 41016778 | + |
| 3989 | CCAGAAGACATCGAT | | CCAGAAGACATCGAT | | | | |
| | CTGACACCCCAGGAG | | CTGACACCCCAGGAG | | | | |
| | TGTGA | | TGTGG | | | | |
| rs56408 | GCCAGCCCCGTGGCC | 517 | GCCAGCCCCGTGGCC | 1833 | 19 | 41016778 | + |
| 3989 | CCAGAAGACATCGAT | | CCAGAAGACATCGAT | | | | |
| | CTGACACCCCAGGAG | | CTGACACCCCAGGAG | | | | |
| | TGTGA | | TGTGG | | | | |
| rs32113 | TGACACCCCAGGAGT | 518 | | | 19 | 41016810 | + |
| 71 | GTGGTGTGGGCAAAA | | | | | | |
| | TACCCCCAACATACC | | | | | | |
| | AGATC | | | | | | |
| rs32113 | TGGAATCCTTTGACC | 519 | TGGAATCCTTTGACC | 1834 | 19 | 41016810 | − |
| 71 | CCCTTCCCTCAGCCC | | CCCTTCCCTCAGCCC | | | | |
| | CTTCAGCGGGGCAGG | | CTTCAGCGGGGCAGG | | | | |
| | AAGCA | | AAGCG | | | | |
| rs32113 | TGGAATCCTTTGACC | 520 | TGGAATCCTTTGACC | 1835 | 19 | 41016810 | − |
| 71 | CCCTTCCCTCAGCCC | | CCCTTCCCTCAGCCC | | | | |
| | CTTCAGCGGGGCAGG | | CTTCAGCGGGGCAGG | | | | |
| | AAGCA | | AAGCG | | | | |
| rs28399 | AATGAGATTCATTGG | 521 | | | 19 | 41518221 | + |
| 499 | TCTTCTTTTCTGTAC | | | | | | |
| | AGAGAGAGTCTACAG | | | | | | |
| | GGAGA | | | | | | |
| rs88782 | TGTGTTCTTTTCTTT | 522 | | | 2 | 233759924 | + |
| 9 | CTAAAAGGCTTTCTA | | | | | | |
| | AAAAGCCTTCTGTTT | | | | | | |
| | AATTT | | | | | | |
| rs88782 | TGTGTTCTTTTCTTT | 523 | | | 2 | 233759924 | + |
| 9 | CTAAAAGGCTTTCTA | | | | | | |
| | AAAAGCCTTCTGTTT | | | | | | |
| | AATTT | | | | | | |
| rs81753 | AACATTAACTTGGTG | 524 | AACATTAACTTGGTG | 1836 | 2 | 233760234 | + |
| 47 | TATCGATTGGTTTTT | | TATCGATTGGTTTTT | | | | |
| | GCCATATATATATAT | | GCCATATATATATAT | | | | |
| | ATAAG | | ATATA | | | | |
| rs81753 | AACATTAACTTGGTG | 525 | AACATTAACTTGGTG | 1837 | 2 | 233760234 | + |
| 47 | TATCGATTGGTTTTT | | TATCGATTGGTTTTT | | | | |
| | GCCATATATATATAT | | GCCATATATATATAT | | | | |
| | ATAAG | | ATATA | | | | |
| rs81753 | CCTTTGCTCCTGCCA | 526 | | | 2 | 233760234 | − |
| 47 | GAGGTTCGCCCTCTC | | | | | | |
| | CTACTTATATATATA | | | | | | |
| | TATAT | | | | | | |
| rs41483 | ATCCTCCCTTTGGAA | 527 | | | 2 | 233760498 | − |
| 23 | TGGCACAGGGTACGT | | | | | | |
| | CTTCAAGGTGTAAAA | | | | | | |
| | TGCTC | | | | | | |
| rs41483 | GACATGAAATAGTTG | 528 | | | 2 | 233760498 | + |
| 23 | TCCTAGCACCTGACG | | | | | | |
| | CCTCGTTGTACATCA | | | | | | |
| | GAGAC | | | | | | |
| rs35350 | ATGCTCATTGCCTTT | 529 | ATGCTCATTGCCTTT | 1838 | 2 | 233760973 | + |
| 960 | TCACAGAACTTTCTG | | TCACAGAACTTTCTG | | | | |
| | TGCGACGTGGTTTAT | | TGCGACGTGGTTTAT | | | | |
| | TCCCA | | TCCCC | | | | |
| rs35350 | CTGGACAGTCACCTC | 530 | CTGGACAGTCACCTC | 1839 | 2 | 233760973 | − |
| 960 | TCTCTGAAGGAATTC | | TCTCTGAAGGAATTC | | | | |
| | TGAGGCAAGGGTTGC | | TGAGGCAAGGGTTGC | | | | |
| | ATACT | | ATACG | | | | |
| rs35350 | ATGCTCATTGCCTTT | 531 | ATGCTCATTGCCTTT | 1840 | 2 | 233760973 | + |
| 960 | TCACAGAACTTTCTG | | TCACAGAACTTTCTG | | | | |
| | TGCGACGTGGTTTAT | | TGCGACGTGGTTTAT | | | | |
| | TCCCA | | TCCCC | | | | |
| rs88782 | AGAGAGGAAGAAGGA | 532 | | | 2 | 234668570 | − |
| 9 | CGACTATGTAGTGAA | | | | | | |
| | CAAGTTAGGCTTCTT | | | | | | |
| | TTCCA | | | | | | |
| rs41483 | GACATGAAATAGTTG | 533 | | | 2 | 234669144 | + |
| 23 | TCCTAGCACCTGACG | | | | | | |
| | CCTCGTTGTACATCA | | | | | | |
| | GAGAC | | | | | | |
| 22_ | TTAGAGCCTCTGGCT | 534 | | | 22 | 42126578 | + |
| 42126578 | AGGGAGCAGGCTGGG | | | | | | |
| | GACTAGGTACCCCAT | | | | | | |
| | TCTAG | | | | | | |
| 22_ | CTTTGCTTTCCTGGT | 535 | | | 22 | 42126578 | − |
| 42126578 | GAGCCCATCCCCCTA | | | | | | |
| | TGAGCTTTGTGCTGT | | | | | | |
| | GCCCC | | | | | | |
| 22_ | CTTTGCTTTCCTGGT | 536 | | | 22 | 42126578 | − |
| 42126578 | GAGCCCATCCCCCTR | | | | | | |
| | YGAGCTTTGTGCTGT | | | | | | |
| | GCCCC | | | | | | |
| 22_ | TTTGCTTTCCTGGTG | 537 | TTTGCTTTCCTGGTG | 1841 | 22 | 42126578 | − |
| 42126578 | AGCCCATCCCCCTAT | | AGCCCATCCCCCTAT | | | | |
| | GAGCTTTGTGCTGTG | | GAGCTTTGTGCTGTG | | | | |
| | CCCCA | | CCCCG | | | | |
| 22_ | TTTGCTTTCCTGGTG | 538 | TTTGCTTTCCTGGTG | 1842 | 22 | 42126578 | − |
| 42126578 | AGCCCATCCCCCTRY | | AGCCCATCCCCCTRY | | | | |
| | GAGCTTTGTGCTGTG | | GAGCTTTGTGCTGTG | | | | |
| | CCCCA | | CCCCG | | | | |
| rs56849 | ACAGCCCCGGCCCAG | 539 | | | 22 | 42126605 | − |
| 5591 | CCACCATGGTGTCTT | | | | | | |
| | TGCYTTYCTGGTGAS | | | | | | |
| | CCCAT | | | | | | |
| rs56849 | CAGCCCCGGCCCAGC | 540 | CAGCCCCGGCCCAGC | 1843 | 22 | 42126605 | − |
| 5591 | CACCATGGTGTCTTT | | CACCATGGTGTCTTT | | | | |
| | GCTTTCCTGGTGAGC | | GCTTTCCTGGTGAGC | | | | |
| | CCATT | | CCATC | | | | |
| rs56849 | CAGCCCCGGCCCAGC | 541 | CAGCCCCGGCCCAGC | 1844 | 22 | 42126605 | − |
| 5591 | CACCATGGTGTCTTT | | CACCATGGTGTCTTT | | | | |
| | GCTTTCCTGGTGAGC | | GCTTTCCTGGTGAGC | | | | |
| | CCATT | | CCATC | | | | |
| rs75467 | TTCTCGGTGCCCACT | 542 | TTCTCGGTGCCCACT | 1845 | 22 | 42126623 | − |
| 367 | GGACAGCCCCGGCCC | | GGACAGCCCCGGCCC | | | | |
| | AGCCACCATGGTGTC | | AGCCACCATGGTGTC | | | | |
| | TTTGG | | TTTGC | | | | |
| rs75467 | TTCTCGGTGCCCACT | 543 | TTCTCGGTGCCCACT | 1846 | 22 | 42126623 | − |
| 367 | GGACAGCCCCGGCCC | | GGACAGCCCCGGCCC | | | | |
| | AGCCACCATGGTGTC | | AGCCACCATGGTGTC | | | | |
| | TTTGG | | TTTGC | | | | |
| rs75467 | TTCTCGGTGCCCACT | 544 | TTCTCGGTGCCCACT | 1847 | 22 | 42126623 | − |
| 367 | GGACAGCCCCGGCCC | | GGACAGCCCCGGCCC | | | | |
| | AGCCACCATGGTGTC | | AGCCACCATGGTGTC | | | | |
| | TTTGG | | TTTGC | | | | |
| rs74478 | GCTTCTCGGTGCCCA | 545 | | | 22 | 42126624 | − |
| 221 | CTGGACAGCCCCGGC | | | | | | |
| | CCAGCCACCATGGTG | | | | | | |
| | TCTTT | | | | | | |
| rs74478 | GCTTCTCGGTGCCCA | 546 | | | 22 | 42126624 | − |
| 221 | CTGGACAGCCCCGGC | | | | | | |
| | CCAGCCACCATGGTG | | | | | | |
| | TCTTT | | | | | | |
| rs74478 | GCTTCTCGGTGCCCA | 547 | | | 22 | 42126624 | − |
| 221 | CTGGACAGCCCCGGC | | | | | | |
| | CCAGCCACCATGGTG | | | | | | |
| | TCTTT | | | | | | |
| rs11358 | CGGGGCACAGCACAA | 548 | CGGGGCACAGCACAA | 1849 | 22 | 42126627 | + |
| 38 | AGCTCATAGGGGGAT | | AGCTCATAGGGGGAT | | | | |
| | GGGCTCACCAGGAAA | | GGGCTCACCAGGAAA | | | | |
| | GCAAA | | GCAAC | | | | |
| rs11358 | GCGGGGCACAGCACA | 549 | | | 22 | 42126627 | + |
| 38 | AAGCTCATAGGGGGA | | | | | | |
| | TGGGCTCACCAGGAA | | | | | | |
| | AGCAA | | | | | | |
| rs11358 | GCGGGGCACAGCACA | 550 | | | 22 | 42126627 | + |
| 38 | AAGCTCATAGGGGGA | | | | | | |
| | TGGGCTCACCAGGAA | | | | | | |
| | AGCAA | | | | | | |
| rs11358 | ACAGCACAAAGCTCA | 551 | ACAGCACAAAGCTCA | 1850 | 22 | 42126633 | + |
| 37 | TAGGGGGATGGGCTC | | TAGGGGGATGGGCTC | | | | |
| | ACCAGGAAAGCAAAG | | ACCAGGAAAGCAAAG | | | | |
| | ACACC | | ACACG | | | | |
| rs11358 | ACAGCACAAAGCTCA | 552 | ACAGCACAAAGCTCA | 1851 | 22 | 42126633 | + |
| 37 | TAGGGGGATGGGCTC | | TAGGGGGATGGGCTC | | | | |
| | ACCAGGAAAGYRAMG | | ACCAGGAAAGYRAMG | | | | |
| | ACACC | | ACACG | | | | |
| rs11358 | GCACTTCAGCTTCTC | 553 | GCACTTCAGCTTCTC | 1852 | 22 | 42126633 | − |
| 37 | GGTGCCCACTGGACA | | GGTGCCCACTGGACA | | | | |
| | GCCCCGGCCCAGCCA | | GCCCCGGCCCAGCCA | | | | |
| | CCATG | | CCATC | | | | |
| 22_ | ACAGCACAAAGCTCA | 554 | | | 22 | 42126634 | + |
| 42126634 | TAGGGGGATGGGCTC | | | | | | |
| | ACCAGGAAAGCAAAG | | | | | | |
| | ACACC | | | | | | |
| 22_ | CAGCACTTCAGCTTC | 555 | | | 22 | 42126634 | − |
| 42126634 | TCGGTGCCCACTGGA | | | | | | |
| | CAGCCCCGGCCCAGC | | | | | | |
| | CACCA | | | | | | |
| 22_ | CAGCACTTCAGCTTC | 556 | | | 22 | 42126634 | − |
| 42126634 | TCGGTGCCCACTGGA | | | | | | |
| | CAGCCCCGGCCCAGC | | | | | | |
| | CACCA | | | | | | |
| rs76650 | CAGCACAAAGCTCAT | 557 | | | 22 | 42126635 | + |
| 7177 | AGGGGGATGGGGTCA | | | | | | |
| | CCAGGAAAGCAAAGA | | | | | | |
| | CACCA | | | | | | |
| rs76650 | GCAGCACTTCAGCTT | 558 | | | 22 | 42126635 | − |
| 7177 | CTCGGTGCCCACTGG | | | | | | |
| | ACAGCCCCGGCCCAG | | | | | | |
| | CCACC | | | | | | |
| rs76650 | GCAGCACTTCAGCTT | 559 | | | 22 | 42126635 | − |
| 7177 | CTCGGTGCCCACTGG | | | | | | |
| | ACAGCCCCGGCCCAG | | | | | | |
| | CCACC | | | | | | |
| rs28371 | AGCACAAAGCTCATA | 560 | | | 22 | 42126636 | + |
| 735 | GGGGGATGGGCTCAC | | | | | | |
| | CAGGAAAGCAAAGAC | | | | | | |
| | ACCAT | | | | | | |
| 22_ | CATAGGGGGATGGGC | 561 | | | 22 | 42126647 | + |
| 42126647 | TCACCAGGAAAGCAA | | | | | | |
| | AGACACCMKRGTGGC | | | | | | |
| | TGGGC | | | | | | |
| 22_ | ATAGGGGGATGGGCT | 562 | ATAGGGGGATGGGCT | 1853 | 22 | 42126647 | + |
| 42126647 | CACCAGGAAAGCAAA | | CACCAGGAAAGCAAA | | | | |
| | GACACCATGGTGGCT | | GACACCATGGTGGCT | | | | |
| | GGGCT | | GGGCC | | | | |
| 22_ | ATAGGGGGATGGGCT | 563 | ATAGGGGGATGGGCT | 1854 | 22 | 42126647 | + |
| 42126647 | CACCAGGAAAGCAAA | | CACCAGGAAAGCAAA | | | | |
| | GACACCMKRGTGGCT | | GACACCMKRGTGGCT | | | | |
| | GGGCT | | GGGCC | | | | |
| 22_ | ACCTCCCTGCTGCAG | 564 | ACCTCCCTGCTGCAG | 1855 | 22 | 42126647 | − |
| 42126647 | CACTTCAGCTTCTCG | | CACTTCAGCTTCTCG | | | | |
| | GTGCCCACTGGACAG | | GTGCCCACTGGACAG | | | | |
| | CCCCA | | CCCCG | | | | |
| 22_ | CATAGaGGGATGGgc | 565 | | | 22 | 42126647 | + |
| 42126647 | TCACCAGgAAagCaA | | | | | | |
| | aGACACcAtgGTGGC | | | | | | |
| | TGGGC | | | | | | |
| rs76577 | AGGAAAGCAAAGACA | 566 | | | 22 | 42126656 | + |
| 6661 | CCATGGTGGCTGGGC | | | | | | |
| | CGGGGCTGTCCAGTG | | | | | | |
| | GGCAC | | | | | | |
| rs11358 | CTCACCAGGAAAGCA | 567 | CTCACCAGGAAAGCA | 1856 | 22 | 42126660 | + |
| 35 | AAGACACCATGGTGG | | AAGACACCATGGTGG | | | | |
| | CTGGGCCGGGGCTGT | | CTGGGCCGGGGCTGT | | | | |
| | CCAGT | | CCAGC | | | | |
| rs76577 | AAAGCAAAGACACCA | 568 | AAAGCAAAGACACCA | 1857 | 22 | 42126666 | + |
| 6661 | TGGTGGCTGGGCCGG | | TGGTGGCTGGGCCGG | | | | |
| | GGCTGTCCAGTGGGC | | GGCTGTCCAGTGGGC | | | | |
| | ACCGA | | ACAGT | | | | |
| rs76577 | GCTCACCAGgAAagc | 569 | GCTCACCAGgAAagc | 1858 | 22 | 42126666 | + |
| 6661 | aAaGACACcAtgGTG | | aAaGACACcAtgGTG | | | | |
| | GCTGGGCCGGGGCTG | | GCTGGGCCGGGGCTG | | | | |
| | TCCaA | | TCCaG | | | | |
| 22_ | CCATGGTGGCTGGGC | 570 | CCATGGTGGCTGGGC | 1859 | 22 | 42126681 | + |
| 42126681 | CGGGGCTGTCCAGTG | | CGGGGCTGTCCAGTG | | | | |
| | GGCACCGAGAAGCTG | | GGCACCGAGAAGCTG | | | | |
| | AAGTG | | AAGTC | | | | |
| 22_ | CCATGGTGGCTGGGC | 571 | CCATGGTGGCTGGGC | 1860 | 22 | 42126681 | + |
| 42126681 | CGGGGCTGTCCAGTG | | CGGGGCTGTCCAGTG | | | | |
| | GGCACCGAGAAGCTG | | GGCACCGAGAAGCTG | | | | |
| | AAGTG | | AAGTC | | | | |
| 22_ | GCCCCTGGCCCGCAT | 572 | GCCCCTGGCCCGCAT | 1861 | 22 | 42126681 | − |
| 42126681 | GGAGCTCTTCCTCTT | | GGAGCTCTTCCTCTT | | | | |
| | CTTCACCTCCCTGCT | | CTTCACCTCCCTGCT | | | | |
| | GCAGC | | GCAGG | | | | |
| 22_ | GGGGCTGTCCAGTGG | 573 | GGGGCTGTCCAGTGG | 1862 | 22 | 42126697 | + |
| 42126697 | GCACCGAGAAGCTGA | | GCACCGAGAAGCTGA | | | | |
| | AGTGCTGCAGCAGGG | | AGTGCTGCAGCAGGG | | | | |
| | AGGTT | | AGGTG | | | | |
| 22_ | CGGGGCTGTCCAGTG | 574 | | | 22 | 42126697 | + |
| 42126697 | GGCACCGAGAAGCTG | | | | | | |
| | AAGTGCTGCAGCAGG | | | | | | |
| | GAGGT | | | | | | |
| 22_ | CGGGGCTGTCCAGTG | 575 | | | 22 | 42126697 | + |
| 42126697 | GGCACCGAGAAGCTG | | | | | | |
| | AAGTGCTGCAGCAGG | | | | | | |
| | GAGGT | | | | | | |
| rs36917 | AGAAGCTGAAGTGCT | 576 | | | 22 | 42126719 | + |
| 7208 | GCAGCAGGGAGGTGA | | | | | | |
| | AGAAGAGGAAGAGCT | | | | | | |
| | CCATG | | | | | | |
| rs36917 | AGAAGCTGAAGTGCT | 577 | | | 22 | 42126719 | + |
| 7208 | GCAGCAGGGAGGTKA | | | | | | |
| | AGAAGAGGAAGAGCT | | | | | | |
| | CCATG | | | | | | |
| rs36917 | GAAGCTGAAGTGCTG | 578 | GAAGCTGAAGTGCTG | 1863 | 22 | 42126719 | + |
| 7208 | CAGCAGGGAGGTKAA | | CAGCAGGGAGGTKAA | | | | |
| | GAAGAGGAAGAGCTC | | GAAGAGGAAGAGCTC | | | | |
| | CATGT | | CATGC | | | | |
| rs75109 | CAGCAGGGAGGTGAA | 579 | | | 22 | 42126735 | + |
| 2905 | GAAGAGGAAGAGCTC | | | | | | |
| | CATGCGGGCCAGGGG | | | | | | |
| | CTCCC | | | | | | |
| rs75109 | CAGCAGGGAGGTGAA | 580 | | | 22 | 42126735 | + |
| 2905 | GAAGAGGAAGAGCTC | | | | | | |
| | CATGCGGGCCAGGGG | | | | | | |
| | CTCCC | | | | | | |
| rs75109 | CAGCAGGGAGGTGAA | 581 | | | 22 | 42126735 | + |
| 2905 | GAAGAGGAAGAGCTC | | | | | | |
| | CATGCGGGCCAGGGG | | | | | | |
| | CTCCC | | | | | | |
| rs53266 | TGAAGAAGAGGAAGA | 582 | | | 22 | 42126746 | + |
| 8079 | GCTCCATGCGGGCCA | | | | | | |
| | GGGGCTCCCCGAGGC | | | | | | |
| | ATGCA | | | | | | |
| rs53266 | TGAAGAAGAGGAAGA | 583 | | | 22 | 42126746 | + |
| 8079 | GCTCCATGCGGGCCA | | | | | | |
| | GGGGCTCCCCGAGGC | | | | | | |
| | ATGCA | | | | | | |
| rs53266 | TGAAGAAGAGGAAGA | 584 | | | 22 | 42126746 | + |
| 8079 | GCTCCATGCGGGCCA | | | | | | |
| | GGGGCTCCCCGAGGC | | | | | | |
| | ATGCA | | | | | | |
| rs73088 | GAAGAAGAGGAAGAG | 585 | | | 22 | 42126747 | + |
| 2251 | CTCCATGCGGGCCAG | | | | | | |
| | GGGCTCCCCGAGGCA | | | | | | |
| | TGCAC | | | | | | |
| rs73088 | GAAGAAGAGGAAGAG | 586 | | | 22 | 42126747 | + |
| 2251 | CTCCATGCGGGCCAG | | | | | | |
| | GGGCTCCCCGAGGCA | | | | | | |
| | TGCAC | | | | | | |
| rs73088 | GAAGAAGAGGAAGAG | 587 | | | 22 | 42126747 | + |
| 2251 | CTCCATGCGGGaCAG | | | | | | |
| | aGGCTCaCCGAGGCA | | | | | | |
| | TGCAC | | | | | | |
| rs26760 | AGAAGAGGAAGAGCT | 588 | | | 22 | 42126749 | + |
| 8319 | CCATGCGGGCCAGGG | | | | | | |
| | GCTCCCCGAGGCATG | | | | | | |
| | CACGG | | | | | | |
| rs26760 | AGAAGAGtAAGAGCT | 589 | | | 22 | 42126749 | + |
| 8319 | CcATGCtGGtCAGcG | | | | | | |
| | GCTCCCCGAGGCATG | | | | | | |
| | CACGG | | | | | | |
| rs56943 | GGGGTATCACCCAGG | 590 | | | 22 | 42126752 | − |
| 9709 | AGCCAGGCTCACTGA | | | | | | |
| | CGCCCCTCCCCTCCC | | | | | | |
| | CACAG | | | | | | |
| rs56943 | GGGGTATCACCCAGG | 591 | | | 22 | 42126752 | − |
| 9709 | AGCCAGGCTCACTGA | | | | | | |
| | CGCCCCTCCCCTCCC | | | | | | |
| | CACAG | | | | | | |
| rs30210 | CCGCTTCCACCCCGA | 592 | | | 22 | 42126877 | − |
| 84 | ACACTTCCTGGATGC | | | | | | |
| | CYAGGGCCACTTTGT | | | | | | |
| | GAAGC | | | | | | |
| rs30210 | GGGAGCCGGGCTCCC | 593 | | | 22 | 42126877 | − |
| 84 | CACAGGCACCTGCTG | | | | | | |
| | AGAAAGGCAGGAAGG | | | | | | |
| | CCTCC | | | | | | |
| rs76396 | CCGTCTGGGAGAAGC | 594 | | | 22 | 42126896 | − |
| 4554 | CCTTCCGCTTCCACC | | | | | | |
| | CCGAACACTTCCTGG | | | | | | |
| | ATGCC | | | | | | |
| rs76396 | CCGTCTGGGAGAAGC | 595 | | | 22 | 42126896 | − |
| 4554 | CCTTCCGCTTCCACC | | | | | | |
| | CCGAACACTTCCTGG | | | | | | |
| | ATGCC | | | | | | |
| rs76396 | CCGTCTGGGAGAAGC | 596 | | | 22 | 42126896 | − |
| 4554 | CCTTCCGCTTCCACC | | | | | | |
| | CCGAACACTTCCTGG | | | | | | |
| | ATGCC | | | | | | |
| rs28371 | GGTGCTGAAGGATGA | 597 | GGTGCTGAAGGATGA | 1864 | 22 | 42126914 | − |
| 733 | GGCCGTCTGGGAGAA | | GGCCGTCTGGGAGAA | | | | |
| | GCCCTTCCGCTTCCA | | GCCCTTCCGCTTCCA | | | | |
| | CCCCC | | CCCCG | | | | |
| rs74708 | CGGCTTCACAAAGTG | 598 | | | 22 | 42126926 | + |
| 9665 | GCCCTGGGCATCCRG | | | | | | |
| | GAAGTGTTBGGGGTG | | | | | | |
| | GAAGC | | | | | | |
| rs74708 | CGGCTTCACAAAGTG | 599 | | | 22 | 42126926 | + |
| 9665 | GCCCTGGGCATCCAG | | | | | | |
| | GAAGTGTTCGGGGTG | | | | | | |
| | GAAGC | | | | | | |
| rs74708 | CGGCTTCACAAAGTG | 600 | | | 22 | 42126926 | + |
| 9665 | GCCCTGGGCATCCAG | | | | | | |
| | GAAGTGTTCGGGGTG | | | | | | |
| | GAAGC | | | | | | |
| 22_ | CATCTTCTGCCCAGG | 601 | | | 22 | 42126956 | − |
| 42126956 | GAACGACACTCATCA | | | | | | |
| | tCAAtCTGTCATCGG | | | | | | |
| | TGCTG | | | | | | |
| 22_ | CATCTTCTGCCCAGG | 602 | | | 22 | 42126956 | − |
| 42126956 | GAACGACACTCATCA | | | | | | |
| | tCAAtCTGTtATCGG | | | | | | |
| | TGCTG | | | | | | |
| 22_ | GCTTCTCCCAGACGG | 603 | | | 22 | 42126981 | + |
| 42126981 | CCTCATCCTTCAGCA | | | | | | |
| | CCGATGACAGGTTGG | | | | | | |
| | TGATG | | | | | | |
| 22_ | GCTTCTCCCAGACGG | 604 | | | 22 | 42126981 | + |
| 42126981 | CCTCATCCTTCAGCA | | | | | | |
| | CYGATGACAGGTTGG | | | | | | |
| | TGATG | | | | | | |
| 22_ | GAGTCCAGTCCCCAC | 605 | | | 22 | 42126981 | − |
| 42126981 | TCTCACCCTGCATCT | | | | | | |
| | CCTGCCCAGGGAACG | | | | | | |
| | ACACT | | | | | | |
| rs77312 | CTGGGTGTGACCCAT | 606 | CTGGGTGTGACCCAT | 1865 | 22 | 42127457 | − |
| 092 | ATGACATCCCGTGAC | | ATGACATCCCGTGAC | | | | |
| | ATCGAAGTACAGGGC | | ATCGAAGTACAGGGC | | | | |
| | TTCCA | | TTCCG | | | | |
| rs77312 | TGCTGGTGCTGAGCT | 607 | | | 22 | 42127457 | + |
| 092 | GGGGTGAGGAGGGCG | | | | | | |
| | CCAGGCCTACCTTAG | | | | | | |
| | GGATG | | | | | | |
| rs26760 | CATGCCCTACACCAC | 608 | | | 22 | 42127514 | − |
| 8293 | TGCCGTGATTCATGA | | | | | | |
| | GGTGCAGCGCTTTGG | | | | | | |
| | GGACA | | | | | | |
| rs26760 | CATGCCCTACACCAC | 609 | | | 22 | 42127514 | − |
| 8293 | TGCCGTGATTCATGA | | | | | | |
| | GGTGCAGCGCTTTGG | | | | | | |
| | GGACA | | | | | | |
| rs26760 | CATGCCCTACACCAC | 610 | | | 22 | 42127514 | − |
| 8293 | TGCCGTGATTCATGA | | | | | | |
| | GGTGCAGCGCTTTGG | | | | | | |
| | GGACA | | | | | | |
| rs15558 | CCAGGCTCACATGCC | 611 | | | 22 | 42127523 | − |
| 88910 | CTACACCACTGCCGT | | | | | | |
| | GATTCAYGAGGTGCA | | | | | | |
| | GCVCT | | | | | | |
| rs15558 | CAGGCTCACATGCCC | 612 | CAGGCTCACATGCCC | 1866 | 22 | 42127523 | − |
| 88910 | TACACCACTGCCGTG | | TACACCACTGCCGTG | | | | |
| | ATTCATGAGGTGCAG | | ATTCATGAGGTGCAG | | | | |
| | CGCTT | | CGCTC | | | | |
| rs15558 | CAGGCTCACATGCCC | 613 | CAGGCTCACATGCCC | 1867 | 22 | 42127523 | − |
| 88910 | TACACCACTGCCGTG | | TACACCACTGCCGTG | | | | |
| | ATTCATGAGGTGCAG | | ATTCATGAGGTGCAG | | | | |
| | CGCTT | | CGCTC | | | | |
| rs20210 | GATAGGGCAGGTGCG | 614 | | | 22 | 42127556 | − |
| 2799 | GCGACCAGAGATGGG | | | | | | |
| | TGACCAGGCTCRCAT | | | | | | |
| | GCCCT | | | | | | |
| rs61736 | TGTCCCCAAAGCGCT | 615 | | | 22 | 42127565 | + |
| 517 | GCACCTCATGAATCA | | | | | | |
| | CGGCAGTGGTGYAGG | | | | | | |
| | GCATG | | | | | | |
| rs61736 | TGTCCCCAAAGCGCT | 616 | | | 22 | 42127565 | + |
| 517 | GCACCTCATGAATCA | | | | | | |
| | CGGCAGTGGTGYAGG | | | | | | |
| | GCATG | | | | | | |
| rs61736 | GTCCCCAAAGCGCTG | 617 | GTCCCCAAAGCGCTG | 1868 | 22 | 42127565 | + |
| 517 | CACCTCATGAATCAC | | CACCTCATGAATCAC | | | | |
| | GGCAGTGGTGTAGGG | | GGCAGTGGTGTAGGG | | | | |
| | CATGT | | CATGC | | | | |
| rs76088 | TCCAGGCCGTGTCCA | 618 | | | 22 | 42127589 | − |
| 846 | ACAGGAGATCGACGA | | | | | | |
| | CGTGATAGGGCAGDT | | | | | | |
| | GNGGY | | | | | | |
| rs76088 | TCCAGGCCGTGTCCA | 619 | | | 22 | 42127589 | − |
| 846 | ACAGGAGATCGACGA | | | | | | |
| | CGTGATAGGGCAGDT | | | | | | |
| | GNGGY | | | | | | |
| rs72549 | GTCCAGGCCGTGTCC | 620 | | | 22 | 42127590 | − |
| 347 | AACAGGAGATCGACG | | | | | | |
| | ACGTGATAGGGCAGG | | | | | | |
| | TGCGG | | | | | | |
| rs26760 | ACGGCAGTGGTGTAG | 621 | ACGGCAGTGGTGTAG | 1869 | 22 | 42127593 | + |
| 8295 | GGCATGTGAGCCTGG | | GGCATGTGAGCCTGG | | | | |
| | TCACCCATCTCTGGT | | TCACCCATCTCTGGT | | | | |
| | YRCCA | | YRCCG | | | | |
| rs26760 | ACGGCAGTGGTGTAG | 622 | ACGGCAGTGGTGTAG | 1870 | 22 | 42127593 | + |
| 8295 | GGCATGTGAGCCTGG | | GGCATGTGAGCCTGG | | | | |
| | TCACCCATCTCTGGT | | TCACCCATCTCTGGT | | | | |
| | YRCCA | | YRCCG | | | | |
| 22_ | GGTGTAGGGCATGTG | 623 | | | 22 | 42127602 | + |
| 42127602 | AGCCTGGTCACCCAT | | | | | | |
| | CTCTGGTCGCCGCAC | | | | | | |
| | CTGCC | | | | | | |
| 22_ | GGTGTAGGGCATGTG | 624 | | | 22 | 42127602 | + |
| 42127602 | AGCCTGGTCACCCAT | | | | | | |
| | CTCTGGTCRCCNCAH | | | | | | |
| | CTGCC | | | | | | |
| 22_ | GACGCATGTCTGTCC | 625 | GACGCATGTCTGTCC | 1871 | 22 | 42127602 | − |
| 42127602 | AGGCCGTGTCCAACA | | AGGCCGTGTCCAACA | | | | |
| | GGAGATCGACGACGT | | GGAGATCGACGACGT | | | | |
| | GATAA | | GATAG | | | | |
| rs59421 | TTGTGGGGACGCATG | 626 | | | 22 | 42127608 | − |
| 388 | TCTGTCCAGGCCGTG | | | | | | |
| | TCCAACAGGAGATCR | | | | | | |
| | ACRRC | | | | | | |
| rs59421 | TTGTGGGGACGCATG | 627 | | | 22 | 42127608 | − |
| 388 | TCTGTCCAGGCCGTG | | | | | | |
| | TCCAACAGGAGATCR | | | | | | |
| | ACRRC | | | | | | |
| rs59421 | TTGTGGGGACGCATG | 628 | | | 22 | 42127608 | − |
| 388 | TCTGTCCAGGCCGTG | | | | | | |
| | TCCAACAGGAGATCR | | | | | | |
| | ACRRC | | | | | | |
| rs74871 | CATTGTGGGGACGCA | 629 | | | 22 | 42127610 | − |
| 2690 | TGTCTGTCCAGGCCG | | | | | | |
| | TGTCCAACAGGMGAT | | | | | | |
| | CRACR | | | | | | |
| rs74871 | CATTGTGGGGACGCA | 630 | | | 22 | 42127610 | − |
| 2690 | TGTCTGTCCAGGCCG | | | | | | |
| | TGTCCAACAGGMGAT | | | | | | |
| | CRACR | | | | | | |
| rs78209 | CCATTGTGGGGACGC | 631 | | | 22 | 42127611 | − |
| 835 | ATGTCTGTCCAGGCC | | | | | | |
| | STGTCCAACAGGMGA | | | | | | |
| | TCRAC | | | | | | |
| rs78209 | CCATTGTGGGGACGC | 632 | | | 22 | 42127611 | − |
| 835 | ATGTCTGTCCAGGCC | | | | | | |
| | STGTCCAACAGGMGA | | | | | | |
| | TCRAC | | | | | | |
| rs78209 | CATTGTGGGGACGCA | 633 | CATTGTGGGGACGCA | 1872 | 22 | 42127611 | − |
| 835 | TGTCTGTCCAGGCCG | | TGTCTGTCCAGGCCG | | | | |
| | TGTCCAACAGGAGAT | | TGTCCAACAGGAGAT | | | | |
| | CGACA | | CGACG | | | | |
| rs14100 | GGACCCCCTGGGTGC | 634 | GGACCCCCTGGGTGC | 1873 | 22 | 42127631 | − |
| 9491 | TGACCCATTGTGGGG | | TGACCCATTGTGGGG | | | | |
| | ACGCATGTCTGTCCA | | ACGCATGTCTGTCCA | | | | |
| | GGCCG | | GGCCC | | | | |
| rs14100 | GGACCCCCTGGGTGC | 635 | GGACCCCCTGGGTGC | 1874 | 22 | 42127631 | − |
| 9491 | TGACCCATTGTGGGG | | TGACCCATTGTGGGG | | | | |
| | ACGCATGTCTGTCCA | | ACGCATGTCTGTCCA | | | | |
| | GGCCG | | GGCCC | | | | |
| rs14100 | GGACCCCCTGGGTGC | 636 | GGACCCCCTGGGTGC | 1875 | 22 | 42127631 | − |
| 9491 | TGACCCATTGTGGGG | | TGACCCATTGTGGGG | | | | |
| | ACGCATGTCTGTCCA | | ACGCATGTCTGTCCA | | | | |
| | GGCCG | | GGCCC | | | | |
| rs28371 | CGGATGTGCAGCGTG | 637 | | | 22 | 42127803 | + |
| 725 | AGaCaATCTGGGAAA | | | | | | |
| | CAGTGCAtGtGCCGA | | | | | | |
| | GGGAG | | | | | | |
| rs28371 | CGtATGTGCAGCGTG | 638 | | | 22 | 42127803 | + |
| 725 | AGaCaATCTGGGAAA | | | | | | |
| | CAGTGCAtGtGCCGA | | | | | | |
| | GGGAG | | | | | | |
| rs28371 | CGtATGTGCAGCGTG | 639 | | | 22 | 42127803 | + |
| 725 | AGaCaATCTGGGAAA | | | | | | |
| | CAGTGCAtGtGCCGA | | | | | | |
| | GGGAG | | | | | | |
| rs72549 | CCTGTACCCTTCCTC | 640 | CCTGTACCCTTCCTC | 1876 | 22 | 42127841 | + |
| 349 | CCTCGGCCCCTGCAC | | CCTCGGCCCCTGCAC | | | | |
| | TGTTTCCCAGATGGG | | TGTTTCCCAGATGGG | | | | |
| | CTCAC | | CTCAG | | | | |
| rs72549 | CCTGTACCCTTCCTC | 641 | CCTGTACCCTTCCTC | 1877 | 22 | 42127841 | + |
| 349 | CCTCGGCCCCTGCAC | | CCTCGGCCCCTGCAC | | | | |
| | TGTTTCCCAGATGGG | | TGTTTCCCAGATGGG | | | | |
| | CTCAC | | CTCAG | | | | |
| rs72549 | CCTGTACCCTTCCTC | 642 | CCTGTACCCTTCCTC | 1878 | 22 | 42127841 | + |
| 349 | CCTCGGCCCCTGCAC | | CCTCGGCCCCTGCAC | | | | |
| | TGTTTCCCAGATGGG | | TGTTTCCCAGATGGG | | | | |
| | CTCAC | | CTCAG | | | | |
| rs73088 | TACCCTTCCTCCCTC | 643 | | | 22 | 42127845 | + |
| 2170 | GGCCCCTGCACTGTT | | | | | | |
| | TCCCAGATGGGCTCA | | | | | | |
| | CGCTG | | | | | | |
| rs73088 | TACCCTTCCTCCCTC | 644 | | | 22 | 42127845 | + |
| 2170 | GGCCCCTGCACTGTT | | | | | | |
| | TCCCAGATGGGCTCA | | | | | | |
| | CGCTG | | | | | | |
| rs73088 | TACCCTTCCTCCCTC | 645 | | | 22 | 42127846 | + |
| 2170 | GGCCCCTGCACTGTT | | | | | | |
| | TCCCAGATGGGCTCA | | | | | | |
| | CGCTG | | | | | | |
| rs79292 | TCCTCCCTCgGcCaC | 646 | | | 22 | 42127852 | + |
| 917 | TGCacTGtttCCCAG | | | | | | |
| | acaGGCTCACGCTGC | | | | | | |
| | ACATC | | | | | | |
| rs79292 | ACCACCTCGACCACG | 647 | | | 22 | 42127852 | − |
| 917 | CTGGCCTGGtGCCTC | | | | | | |
| | CTGCTCATGATCCTA | | | | | | |
| | CAtCc | | | | | | |
| rs79292 | ACCACCTCGACCACa | 648 | | | 22 | 42127852 | − |
| 917 | CTGaCCTGGcGCCTC | | | | | | |
| | CTGCTCATGATCCTA | | | | | | |
| | CAtCc | | | | | | |
| rs50308 | CCCTCGGCCCCTGCA | 649 | | | 22 | 42127856 | + |
| 67 | CTGTTTCCCAGATGG | | | | | | |
| | GCTCACGCTGCACAT | | | | | | |
| | CCGGA | | | | | | |
| rs50308 | CCCTCGGCCCCTGCA | 650 | | | 22 | 42127856 | + |
| 67 | CTGTTTCCCAGATGG | | | | | | |
| | GCTCACGCTGCACAT | | | | | | |
| | CCGGA | | | | | | |
| rs50308 | CCCTCGGCCCCTGCA | 651 | | | 22 | 42127856 | + |
| 67 | CTGTTTCCCAGATGG | | | | | | |
| | GCTCACGCTGCACAT | | | | | | |
| | CCGGA | | | | | | |
| 22_ | ATCCGGATGTAGGAT | 652 | | | 22 | 42127899 | + |
| 42127899 | CATGAGCAGGAGGCC | | | | | | |
| | CCAGGCCAGCGTGGT | | | | | | |
| | CGAGG | | | | | | |
| 22_ | ATCCGGATGTAGGAT | 653 | | | 22 | 42127899 | + |
| 42127899 | CATGAGCAGGAGGCC | | | | | | |
| | CCAGGCCAGCGTGGT | | | | | | |
| | CGAGG | | | | | | |
| 22_ | ATCCGGATGTAGGAT | 654 | | | 22 | 42127899 | + |
| 42127899 | CATGAGCAGGAGGCC | | | | | | |
| | CCAGGCCAGCGTGGT | | | | | | |
| | CGAGG | | | | | | |
| rs14067 | GAGGCCCCAGGCCAG | 655 | GAGGCCCCAGGCCAG | 1879 | 22 | 42127922 | + |
| 19554 | CGTGGTCGAGGYGGT | | CGTGGTCGAGGYGGT | | | | |
| | CACCATCCCGGCAGA | | CACCATCCCGGCAGA | | | | |
| | GAACA | | GAACG | | | | |
| rs14067 | CCCTGAGAGCAGCTT | 656 | | | 22 | 42127922 | − |
| 19554 | CAATGATGAGAACCT | | | | | | |
| | GCGCATAGTGGTGGC | | | | | | |
| | TGACC | | | | | | |
| rs14067 | CCCTGAGAGCAGCTT | 657 | | | 22 | 42127922 | − |
| 19554 | CAATGATGAGAACCT | | | | | | |
| | GYGCMTAGTGGTGGC | | | | | | |
| | TGACC | | | | | | |
| rs94971 | GTGGTCGAGGTGGTC | 658 | GTGGTCGAGGTGGTC | 1880 | 22 | 42127938 | + |
| 7872 | ACCATCCCGGCAGAG | | ACCATCCCGGCAGAG | | | | |
| | AACAGGTCAGCCACC | | AACAGGTCAGCCACC | | | | |
| | ACTAT | | ACTAG | | | | |
| rs94971 | GTGGTCGAGGTGGTC | 659 | GTGGTCGAGGTGGTC | 1881 | 22 | 42127938 | + |
| 7872 | ACCATCCCGGCAGAG | | ACCATCCCGGCAGAG | | | | |
| | AACAGGTCAGCCACC | | AACAGGTCAGCCACC | | | | |
| | ACTAT | | ACTAG | | | | |
| rs94971 | CGTGGTCGAGGTGGT | 660 | | | 22 | 42127938 | + |
| 7872 | CACCATCCCGGCAGA | | | | | | |
| | GAACAGGTCAGCCAC | | | | | | |
| | CACTA | | | | | | |
| rs16947 | CTGCTCAGGCCAAGG | 661 | | | 22 | 42127941 | − |
| | GGAACCCTGAGAGCA | | | | | | |
| | GCTTCAATGATGAGA | | | | | | |
| | ACCTG | | | | | | |
| rs26760 | TGTCCCGAGTATGCT | 662 | | | 22 | 42127962 | − |
| 8279 | CTCGGCCCTGCTCAG | | | | | | |
| | GCCAAGGGGARCCCT | | | | | | |
| | GAGAG | | | | | | |
| rs26760 | TGTCCCGAGTATGCT | 663 | | | 22 | 42127962 | − |
| 8279 | CTCGGCCCTGCTCAG | | | | | | |
| | GCCAAGGGGARCCCT | | | | | | |
| | GAGAG | | | | | | |
| rs11358 | TACCCCGTTCTGTCC | 664 | | | 22 | 42127973 | − |
| 29 | CGAGTATGCTCTCGG | | | | | | |
| | CCCTGCTCAGGCCAA | | | | | | |
| | GGGGA | | | | | | |
| rs11358 | ACCCCGTTCTGTCCC | 665 | ACCCCGTTCTGTCCC | 1882 | 22 | 42127973 | − |
| 29 | GAGTATGCTCTCGGC | | GAGTATGCTCTCGGC | | | | |
| | CCTGCTCAGGCCAAG | | CCTGCTCAGGCCAAG | | | | |
| | GGGAA | | GGGAG | | | | |
| rs11358 | ACCCCGTTCTGTCCC | 666 | ACCCCGTTCTGTCCC | 1883 | 22 | 42127973 | − |
| 29 | GAGTATGCTCTCGGC | | GAGTATGCTCTCGGC | | | | |
| | CCTGCTCAGGCCAAG | | CCTGCTCAGGCCAAG | | | | |
| | GGGAA | | GGGAG | | | | |
| rs11358 | TACCCCGTTCTGTCC | 667 | | | 22 | 42127973 | − |
| 29 | CGAGTATGCTCTCGG | | | | | | |
| | CCCTGCTCAGGCCAA | | | | | | |
| | GGGGA | | | | | | |
| rs11358 | TACCCCGTTCTGTCC | 668 | | | 22 | 42127973 | − |
| 29 | CGAGTATGCTCTCGG | | | | | | |
| | CCCTGCTCAGGCCAA | | | | | | |
| | GGGGA | | | | | | |
| rs50306 | CAGCCCAGCCCCCCt | 669 | | | 22 | 42128174 | − |
| 56 | GAGACtTGACTGAGt | | | | | | |
| | CCTTCCTGGCAGAGA | | | | | | |
| | TGGAG | | | | | | |
| rs50306 | CAGCCCAGCCCCCCt | 670 | | | 22 | 42128174 | − |
| 56 | GAGACtTGACTGAGt | | | | | | |
| | CCTTCCTGGCAGAGA | | | | | | |
| | TGGAG | | | | | | |
| rs50306 | CAGCCCAGCCCCCCt | 671 | | | 22 | 42128174 | − |
| 56 | GAGACtTGACTGAGt | | | | | | |
| | CCTTCCTGGCAGAGA | | | | | | |
| | TGGAG | | | | | | |
| rs11358 | GACCCAGCCCAGCCC | 672 | GACCCAGCCCAGCCC | 1884 | 22 | 42128181 | − |
| 28 | CCCCGAGACCTGACT | | CCCCGAGACCTGACT | | | | |
| | GAGGCCTTCCTKGCA | | GAGGCCTTCCTKGCA | | | | |
| | RAGAA | | RAGAT | | | | |
| rs11358 | GACCCAGCCCAGCCC | 673 | GACCCAGCCCAGCCC | 1885 | 22 | 42128181 | − |
| 28 | CCCCGAGACCTGACT | | CCCCGAGACCTGACT | | | | |
| | GAGGCCTTCCTKGCA | | GAGGCCTTCCTKGCA | | | | |
| | RAGAA | | RAGAT | | | | |
| rs77913 | CCTGGGACCCAGCCC | 674 | | | 22 | 42128185 | − |
| 725 | AGCCCCCCCGAGACC | | | | | | |
| | TGACTGAGGCCTTCC | | | | | | |
| | TKGCA | | | | | | |
| rs72549 | CACCGTGGCAGCCAC | 675 | | | 22 | 42128201 | + |
| 351 | TCTCACCTTCTCCAT | | | | | | |
| | CTCTGCCAGGAAGGC | | | | | | |
| | CTCAG | | | | | | |
| rs72549 | CACCGTGGCAGCCAC | 676 | | | 22 | 42128201 | + |
| 351 | TCTCACCTTCTCCAT | | | | | | |
| | CTCTGCCAGGAAGGC | | | | | | |
| | CTCAG | | | | | | |
| rs36754 | ATGAGCTGCTAACTG | 677 | | | 22 | 42128212 | − |
| 3000 | AGCACAGGATGACCT | | | | | | |
| | GGGACCCAGCCCAGC | | | | | | |
| | CCCCC | | | | | | |
| rs36754 | ATGAGCTGCTAACTG | 678 | | | 22 | 42128212 | − |
| 3000 | AGCACAGGATGACCT | | | | | | |
| | GGGACCCAGCCCAGC | | | | | | |
| | MMYCC | | | | | | |
| rs36754 | ATGAGCTGCTAACTG | 679 | | | 22 | 42128212 | − |
| 3000 | AGCACAGGATGACCT | | | | | | |
| | GGGACCCAGCCCAGC | | | | | | |
| | CCCCC | | | | | | |
| rs72549 | TGCTAACTGAGCACA | 680 | TGCTAACTGAGCACA | 1886 | 22 | 42128218 | − |
| 352 | GGATGACCTGGGACC | | GGATGACCTGGGACC | | | | |
| | CAGCCCAGCCCYCCY | | CAGCCCAGCCCCYCC | | | | |
| | RAGAC | | YRAGA | | | | |
| rs72549 | TGCTAACTGAGCACA | 681 | TGCTAACTGAGCACA | 1887 | 22 | 42128218 | − |
| 352 | GGATGACCTGGGACC | | GGATGACCTGGGACC | | | | |
| | CAGCCCAGCCCYCCY | | CAGCCCAGCCCCYCC | | | | |
| | RAGAC | | YRAGA | | | | |
| rs72549 | TGCTAACTGAGCACA | 682 | TGCTAACTGAGCACA | 1888 | 22 | 42128218 | − |
| 352 | GGATGACCTGGGACC | | GGATGACCTGGGACC | | | | |
| | CAGCCCAGCCCCCCC | | CAGCCCAGCCCCCCC | | | | |
| | GAGAC | | CGAGA | | | | |
| rs26760 | CTGCCAGGAAGGCCT | 683 | | | 22 | 42128235 | + |
| 8297 | CAGTCAGGTCTCGGG | | | | | | |
| | GGGGCTGGGCTGGGT | | | | | | |
| | CCCAG | | | | | | |
| rs35742 | GAAGGCCTCAGTCAG | 684 | | | 22 | 42128241 | + |
| 686 | GTCTCGGGGGGGCTG | | | | | | |
| | GGCTGGGTCCCAGGT | | | | | | |
| | CATCC | | | | | | |
| rs35742 | GAAGGCCTCAGTCAG | 685 | | | 22 | 42128241 | + |
| 686 | GTCTCGGGGGKGCTG | | | | | | |
| | GGCTGGGTCCCAGRT | | | | | | |
| | CATCC | | | | | | |
| rs72549 | AGTCAGGTCTCGGGG | 686 | | | 22 | 42128248 | + |
| 353 | GGGCTGGGCTGGGTC | | | | | | |
| | CCAGGTCATCCTGTG | | | | | | |
| | CTCAG | | | | | | |
| rs72549 | AGTCAGGTCTCGGGG | 687 | | | 22 | 42128248 | + |
| 353 | GGGCTGGGCTGGGTC | | | | | | |
| | CCAGRTCATCCTGTG | | | | | | |
| | CTCAG | | | | | | |
| rs72549 | AAGGTCCTACGCTTC | 688 | | | 22 | 42128248 | − |
| 353 | CAAAAGGCTTTCCTG | | | | | | |
| | ACCCAGCTGGATGAG | | | | | | |
| | CTGCT | | | | | | |
| 22_ | GGCTGGGTCCCAGGT | 689 | | | 22 | 42128272 | + |
| 42128272 | CATCCTGTGCTCAGT | | | | | | |
| | TAGCAGCTCATCCAG | | | | | | |
| | CTGGG | | | | | | |
| 22_ | GGCTGGGTCCCAGGT | 690 | | | 22 | 42128272 | + |
| 42128272 | CATCCTGTGCTCAGT | | | | | | |
| | TAGCAGCTCATCCAG | | | | | | |
| | CTGGG | | | | | | |
| 22_ | GGCTGGGTCCCAGGT | 691 | | | 22 | 42128272 | + |
| 42128272 | CATCCTGTGCTCAGT | | | | | | |
| | TAGCAGCTCATCCAG | | | | | | |
| | CTGGG | | | | | | |
| rs28371 | TGGTGTAGGTGCTGA | 692 | | | 22 | 42128308 | − |
| 717 | ATGCTGTCCCCGTCC | | | | | | |
| | TCCTGCATATCCCAG | | | | | | |
| | CGCTG | | | | | | |
| rs28371 | TGGTGTAGGTGCTGA | 693 | | | 22 | 42128308 | − |
| 717 | ATGCTGTCCCCGTCC | | | | | | |
| | TCCTGCATATCCCAG | | | | | | |
| | CGCTG | | | | | | |
| rs28371 | TGGTGTAGGTGCTGA | 694 | | | 22 | 42128308 | − |
| 717 | ATGCTGTCCCCGTCC | | | | | | |
| | TCCTGCATATCCCAG | | | | | | |
| | CGCTG | | | | | | |
| rs17002 | GGAAAGCCTTTTGGA | 695 | | | 22 | 42128325 | + |
| 853 | AGCGTAGGACCTTGC | | | | | | |
| | CAGMCARCGCTGGGA | | | | | | |
| | TRTGC | | | | | | |
| rs17002 | GAAAGCCTTTTGGAA | 696 | GAAAGCCTTTTGGAA | 1889 | 22 | 42128325 | + |
| 853 | GCGTAGGACCTTGCC | | GCGTAGGACCTTGCC | | | | |
| | AGMCARCGCTGGGAT | | AGMCARCGCTGGGAT | | | | |
| | RTGCA | | RTGCG | | | | |
| rs17002 | GAAAGCCTTTTGGAA | 697 | GAAAGCCTTTTGGAA | 1890 | 22 | 42128325 | + |
| 853 | GCGTAGGACCTTGCC | | GCGTAGGACCTTGCC | | | | |
| | AGMCARCGCTGGGAT | | AGMCARCGCTGGGAT | | | | |
| | RTGCA | | RTGCG | | | | |
| 22_ | TTCCTCAGGCTGCTG | 698 | | | 22 | 42128795 | − |
| 42128795 | GACCTAGCTCAGGAG | | | | | | |
| | GGACTGAAGGAGGAG | | | | | | |
| | TCGGG | | | | | | |
| 22_ | TTCCTCAGGCTGCTG | 699 | | | 22 | 42128795 | − |
| 42128795 | GACCTAGCTCAGGAG | | | | | | |
| | GGACTGAAGGAGGAG | | | | | | |
| | TCGGG | | | | | | |
| rs19953 | GTACGACGACCCTCG | 700 | | | 22 | 42128812 | − |
| 5154 | CTTCCTCAGGCTGCT | | | | | | |
| | GGACCTAGCTCAGGA | | | | | | |
| | GGVAY | | | | | | |
| rs72549 | GTCTCTCGCTCCGCA | 701 | | | 22 | 42128817 | + |
| 354 | CCTCGCGCAGAAAGC | | | | | | |
| | CCGACTCCTCCTTCR | | | | | | |
| | RTBCC | | | | | | |
| rs72549 | GTCTCTCGCTCCGCA | 702 | | | 22 | 42128817 | + |
| 354 | CCTCGCGCAGAAAGC | | | | | | |
| | CCGACTCCTCCTTCA | | | | | | |
| | GTCCC | | | | | | |
| rs72549 | GTCTCTCGCTCCGCA | 703 | | | 22 | 42128817 | + |
| 354 | CCTCGCGCAGAAAGC | | | | | | |
| | CCGACTCCTCCTTCA | | | | | | |
| | GTCCC | | | | | | |
| rs74536 | CCGACTCCTCCTTCA | 704 | | | 22 | 42128848 | + |
| 5204 | GTCCCTCCTGAGCTA | | | | | | |
| | GGTCCAGCAGCCTGA | | | | | | |
| | GGAAG | | | | | | |
| rs74536 | CCGACTCCTCCTTCA | 705 | | | 22 | 42128848 | + |
| 5204 | GTCCCTCCTGAGCTA | | | | | | |
| | GGTCCAGCAGCCTGA | | | | | | |
| | GGAAG | | | | | | |
| rs74536 | CCGACTCCTCCTTCA | 706 | | | 22 | 42128848 | + |
| 5204 | GTCCCTCCTGAGCTA | | | | | | |
| | GGTCCAGCAGCCTGA | | | | | | |
| | GGAAG | | | | | | |
| 22_ | GGTCCAGCAGCCTGA | 707 | | | 22 | 42128878 | + |
| 42128878 | GGAAGCGAGGGTCGT | | | | | | |
| | CGTACTCGAAGCGGC | | | | | | |
| | GCCCG | | | | | | |
| 22_ | GTCCAGCAGCCTGAG | 708 | GTCCAGCAGCCTGAG | 1891 | 22 | 42128878 | + |
| 42128878 | GAAGCGAGGGTCGTC | | GAAGCGAGGGTCGTC | | | | |
| | GTACTCGAAGCGGCG | | GTACTCGAAGCGGCG | | | | |
| | CCCGA | | CCCGC | | | | |
| 22_ | AACGGTCTCTTGGAC | 709 | AACGGTCTCTTGGAC | 1892 | 22 | 42128878 | − |
| 42128878 | AAAGCCGTGAGCAAC | | AAAGCCGTGAGCAAC | | | | |
| | GTGATCGCCTCCCTC | | GTGATCGCCTCCCTC | | | | |
| | ACCTT | | ACCTG | | | | |
| 22_ | TCCAGCAGCCTGAGG | 710 | TCCAGCAGCCTGAGG | 1893 | 22 | 42128879 | + |
| 42128879 | AAGCGAGGGTCGTCG | | AAGCGAGGGTCGTCG | | | | |
| | TACTCGAAGCGGCGC | | TACTCGAAGCGGCGC | | | | |
| | CCGCA | | CCGCG | | | | |
| 22_ | CCAACGGTCTCTTGG | 711 | | | 22 | 42128879 | − |
| 42128879 | ACAAAGCCGTGAGCA | | | | | | |
| | ACGTGATCGCCTCCC | | | | | | |
| | TCACC | | | | | | |
| 22_ | CAACGGTCTCTTGGA | 712 | CAACGGTCTCTTGGA | 1894 | 22 | 42128879 | − |
| 42128879 | CAAAGCCGTGAGCAA | | CAAAGCCGTGAGCAA | | | | |
| | CGTGATCGCCTCCCT | | CGTGATCGCCTCCCT | | | | |
| | CACCT | | CACCC | | | | |
| rs72549 | GGCGACCCCTTACCC | 713 | GGCGACCCCTTACCC | 1895 | 22 | 42128927 | − |
| 356 | GCATCTCCCACCCCC | | GCATCTCCCACCCCC | | | | |
| | ARGACGCCCCTTTYG | | ARGACGCCCCTTTYG | | | | |
| | CCCCA | | CCCCT | | | | |
| rs72549 | GGCGACCCCTTACCC | 714 | GGCGACCCCTTACCC | 1896 | 22 | 42128927 | − |
| 356 | GCATCTCCCACCCCC | | GCATCTCCCACCCCC | | | | |
| | ARGACGCCCCTTTYG | | ARGACGCCCCTTTYG | | | | |
| | CCCCA | | CCCCT | | | | |
| rs38920 | GAAGGCGGGGGACGG | 715 | | | 22 | 42128945 | − |
| 97 | GGAAGGCGACCCCTT | | | | | | |
| | ACCCGCATCTCCCAC | | | | | | |
| | CCCCA | | | | | | |
| rs38920 | GAAGGCGGGGGACGG | 716 | | | 22 | 42128945 | − |
| 97 | GGAAGGCGACCCCTT | | | | | | |
| | ACCCGCATCTCCCAC | | | | | | |
| | CCCCA | | | | | | |
| rs50308 | GGTGACCGAGGAGGC | 717 | GGTGACCGAGGAGGC | 1897 | 22 | 42129033 | − |
| 65 | CGCCTGCCTTTGTGC | | CGCCTGCCTTTGTGC | | | | |
| | CGCCTTCGCCAACCA | | CGCCTTCGCCAACCA | | | | |
| | CTCCA | | CTCCG | | | | |
| rs50308 | GGTGACCGAGGAGGC | 718 | GGTGACCGAGGAGGC | 1898 | 22 | 42129033 | − |
| 65 | CGCCTGCCTTTGTGC | | CGCCTGCCTTTGTGC | | | | |
| | CGCCTTCGCCAACCA | | CGCCTTCGCCAACCA | | | | |
| | CTCCA | | CTCCG | | | | |
| rs50308 | GGGTGACCGAGGAGG | 719 | | | 22 | 42129033 | − |
| 65 | CCGCCTGCCTTTGTG | | | | | | |
| | CCGCCTTCGCCAACC | | | | | | |
| | ACTCC | | | | | | |
| rs11358 | CCCCGCCTTCCCAGT | 720 | | | 22 | 42129036 | + |
| 26 | TCCCGCTTTGTGCCC | | | | | | |
| | TTCTGCCCATCACCC | | | | | | |
| | ACHRG | | | | | | |
| rs11358 | AGTGGGTGACCGAGG | 721 | | | 22 | 42129036 | − |
| 26 | AGGCCGCCTGCCTTT | | | | | | |
| | GTGCCGCCTTCGCYR | | | | | | |
| | ACCAM | | | | | | |
| rs11358 | GTGGGTGACCGAGGA | 722 | GTGGGTGACCGAGGA | 1899 | 22 | 42129036 | − |
| 26 | GGCCGCCTGCCTTTG | | GGCCGCCTGCCTTTG | | | | |
| | TGCCGCCTTCGCYRA | | TGCCGCCTTCGCYRA | | | | |
| | CCAMT | | CCAMG | | | | |
| rs11358 | CAGTGGGTGACCGAG | 723 | | | 22 | 42129037 | − |
| 25 | GAGGCCGCCTGCCTT | | | | | | |
| | TGTGCCGCCTTCGCC | | | | | | |
| | AACCA | | | | | | |
| rs11358 | CAGTGGGTGACCGAG | 724 | | | 22 | 42129037 | − |
| 25 | GAGGCCGCCTGCCTT | | | | | | |
| | TSTGCCGCCTTCGCY | | | | | | |
| | RACCA | | | | | | |
| rs11358 | CTTCCCAGTTCCCGC | 725 | | | 22 | 42129042 | + |
| 24 | TTTGTGCCCTTCTGC | | | | | | |
| | CCATCACCCACCRGM | | | | | | |
| | KTGGT | | | | | | |
| rs11358 | TTCCCAGTTCCCGCT | 726 | TTCCCAGTTCCCGCT | 2208 | 22 | 42129042 | + |
| 24 | TTGTGCCCTTCTGCC | | TTGTGCCCTTCTGCC | | | | |
| | CATCACCCACCRGMK | | CATCACCCACCRGMK | | | | |
| | TGGTT | | TGGTC | | | | |
| rs11358 | TGGAGCAGTGGGTGA | 727 | | | 22 | 42129042 | − |
| 24 | CCGAGGAGGCCGCCT | | | | | | |
| | GCCTTTSTGCCGCCT | | | | | | |
| | TCGCY | | | | | | |
| 22_ | TTTGTGCCCTTCTGC | 728 | TTTGTGCCCTTCTGC | 2209 | 22 | 42129056 | + |
| 42129056 | CCATCACCCACCGGA | | CCATCACCCACCGGA | | | | |
| | GTGGTTGGCGAAGGC | | GTGGTTGGCGAAGGC | | | | |
| | GGCAC | | GGCAG | | | | |
| 22_ | GGCAAGAAGTCGCTG | 729 | GGCAAGAAGTCGCTG | 2210 | 22 | 42129056 | − |
| 42129056 | GAGCAGTGGGTGACC | | GAGCAGTGGGTGACC | | | | |
| | GAGGAGGCCGCCTGC | | GAGGAGGCCGCCTGC | | | | |
| | CTTTG | | CTTTC | | | | |
| 22_ | GGCAAGAAGTCGCTG | 730 | GGCAAGAAGTCGCTG | 2211 | 22 | 42129056 | − |
| 42129056 | GAGCAGTGGGTGACC | | GAGCAGTGGGTGACC | | | | |
| | RAGGHGGCYGCCTGC | | RAGGHGGCYGCCTGC | | | | |
| | CTTTG | | CTTTC | | | | |
| 22_ | GGCAAGAAGTCGCTG | 731 | GGCAAGAAGTCGCTG | 2212 | 22 | 42129056 | − |
| 42129056 | GAGCAGTGGGTGACC | | GAGCAGTGGGTGACC | | | | |
| | GAGGAGGCCGCCTGC | | GAGGAGGCCGCCTGC | | | | |
| | CTTTG | | CTTTC | | | | |
| rs26760 | CCCATCACCCACCGG | 732 | | | 22 | 42129071 | + |
| 8302 | AGTGGTTGGCGAAGG | | | | | | |
| | CGGCACAAAGGCAGG | | | | | | |
| | CGGCC | | | | | | |
| rs28371 | TCACCCACCGGAGTG | 733 | | | 22 | 42129075 | + |
| 710 | GTTGGCGAAGGCGGC | | | | | | |
| | ACAAAGGCAGGCGGC | | | | | | |
| | CTCCT | | | | | | |
| rs28371 | TCACCCACCGGAGTG | 734 | | | 22 | 42129075 | + |
| 710 | GTTGGCGAAGGCGGC | | | | | | |
| | ACAAAGGCAGGCGGC | | | | | | |
| | CTCCT | | | | | | |
| rs50306 | CCGTGTCCACCTTGC | 735 | | | 22 | 42129083 | − |
| 55 | GCAACTTGGGCCTGG | | | | | | |
| | GCAAGAAGTCGCTGG | | | | | | |
| | AGCAG | | | | | | |
| rs50306 | CCGTGTCCACCTTGC | 736 | | | 22 | 42129083 | − |
| 55 | GCAACTTGGGCCTGG | | | | | | |
| | GCAAGAAGTCGCTGG | | | | | | |
| | AGCAG | | | | | | |
| rs78482 | TGGTTGGCGAAGGCG | 737 | TGGTTGGCGAAGGCG | 2213 | 22 | 42129087 | + |
| 768 | GCACAAAGGCAGGCG | | GCACAAAGGCAGGCG | | | | |
| | GCCTCCTCGGTCACC | | GCCTCCTCGGTCACC | | | | |
| | CACTC | | CACTG | | | | |
| rs56922 | AGGCGGCACAAAGGC | 738 | | | 22 | 42129098 | + |
| 9126 | AGGCGGCCTCCTYGG | | | | | | |
| | TCACCCACTSCTCCA | | | | | | |
| | GCGAC | | | | | | |
| rs56922 | AGGCGGCACAAAGGC | 739 | | | 22 | 42129098 | + |
| 9126 | AGGCGGCCTCCTYGG | | | | | | |
| | TCACCCACTSCTCCA | | | | | | |
| | GCGAC | | | | | | |
| rs56922 | GGCGGCACAAAGGCA | 740 | GGCGGCACAAAGGCA | 2214 | 22 | 42129098 | + |
| 9126 | GGCGGCCTCCTCGGT | | GGCGGCCTCCTCGGT | | | | |
| | CACCCACTGCTCCAG | | CACCCACTGCTCCAG | | | | |
| | CGACT | | CGACC | | | | |
| rs37513 | GCCCGCGTGGCGCGA | 741 | | | 22 | 42129113 | − |
| 5093 | GCAGAGGCGCTTCTC | | | | | | |
| | CGTGTCCACCTTGCG | | | | | | |
| | CAACT | | | | | | |
| rs37513 | GCCCGCGTGGCGCGA | 742 | | | 22 | 42129113 | − |
| 5093 | GCAGAGGCGCTTCTC | | | | | | |
| | CGTGTCCACCTTGCG | | | | | | |
| | CAACT | | | | | | |
| rs37513 | GCCCGCGTGGCGCGA | 743 | | | 22 | 42129113 | − |
| 5093 | GCAGAGGCGCTTCTC | | | | | | |
| | CGTGTCCACCTTGCG | | | | | | |
| | CAACT | | | | | | |
| rs61736 | GTTCCTGGCGCGCTA | 744 | GTTCCTGGCGCGCTA | 2215 | 22 | 42129132 | − |
| 512 | TGGGCCCGCGTGGCG | | TGGGCCCGCGTGGCG | | | | |
| | CGAGCAGAGGCGCTT | | CGAGCAGAGGCGCTT | | | | |
| | CTCCA | | CTCCG | | | | |
| rs61736 | GTTCCTGGCGCGCTA | 745 | GTTCCTGGCGCGCTA | 2216 | 22 | 42129132 | − |
| 512 | TGGGCCCGCGTGGCG | | TGGGCCCGCGTGGCG | | | | |
| | CGAGCAGAGGCGCTT | | CGAGCAGAGGCGCTT | | | | |
| | CTCCA | | CTCCG | | | | |
| rs61736 | GTTCCTGGCGCGCTA | 746 | GTTCCTGGCGCGCTA | 2217 | 22 | 42129132 | − |
| 512 | TGGGCCCGCGTGGCG | | TGGGCCCGCGTGGCG | | | | |
| | CGAGCAGAGGCGCTT | | CGAGCAGAGGCGCTT | | | | |
| | CTCCA | | CTCCG | | | | |
| rs78145 | ACTGCTCCAGCGACT | 747 | | | 22 | 42129134 | + |
| 7579 | TCTTGCCCAGGCCCR | | | | | | |
| | AGTTGCGCAAGGTGG | | | | | | |
| | ASAYG | | | | | | |
| rs78145 | GGTGTTCCTGGCGCG | 748 | | | 22 | 42129134 | − |
| 7579 | CTATGGGCCCGCGTG | | | | | | |
| | GCGCGAGCAGAGGCG | | | | | | |
| | CTTCT | | | | | | |
| rs78145 | GTGTTCCTGGCGCGC | 749 | GTGTTCCTGGCGCGC | 1900 | 22 | 42129134 | − |
| 7579 | TATGGGCCCGCGTGG | | TATGGGCCCGCGTGG | | | | |
| | CGCGAGCAGAGGCGC | | CGCGAGCAGAGGCGC | | | | |
| | TTCTT | | TTCTC | | | | |
| 22_ | CCAGGCCCAAGTTGC | 750 | | | 22 | 42129155 | + |
| 42129155 | GCAAGGTGGACACGG | | | | | | |
| | AGAAGCGCCTCTGCT | | | | | | |
| | CGCGC | | | | | | |
| 22_ | CAGGCCCAAGTTGCG | 751 | CAGGCCCAAGTTGCG | 1901 | 22 | 42129155 | + |
| 42129155 | CAAGGTGGACACGGA | | CAAGGTGGACACGGA | | | | |
| | GAAGCGCCTCTGCTC | | GAAGCGCCTCTGCTC | | | | |
| | GCGCT | | GCGCC | | | | |
| 22_ | CGTGCCCGTCCCACC | 752 | | | 22 | 42129155 | − |
| 42129155 | CCCAGGGGTGTTYCT | | | | | | |
| | GKCGCGCTATGGGCC | | | | | | |
| | CGCGT | | | | | | |
| rs11358 | GCCTTCATGGCCACG | 753 | | | 22 | 42129174 | − |
| 23 | CGCACGTGCCCGTCC | | | | | | |
| | CACCCCCAGGGGTGT | | | | | | |
| | TCCTG | | | | | | |
| rs11358 | ACGGAGAAGCGCCTC | 754 | ACGGAGAAGCGCCTC | 1902 | 22 | 42129180 | + |
| 22 | TGCTCGCGCCACGCG | | TGCTCGCGCCACGCG | | | | |
| | GGCCCATAGCGCGCC | | GGCCCATAGCGCGCC | | | | |
| | AGGAA | | AGGAT | | | | |
| rs37461 | GGAGAAGCGCCTCTG | 755 | | | 22 | 42129183 | + |
| 6348 | CTCGCGCCACGCGGG | | | | | | |
| | CCCATAGCGCGCCAG | | | | | | |
| | GAACA | | | | | | |
| rs37461 | GGAGAAGCGCCTCTG | 756 | | | 22 | 42129183 | + |
| 6348 | CTCGCGCCACGCGGG | | | | | | |
| | CCCATAGCGCGCCAG | | | | | | |
| | GAACA | | | | | | |
| rs37461 | GGAGAAGCGCCTCTG | 757 | | | 22 | 42129183 | + |
| 6348 | CTCGCGCCACGCGGG | | | | | | |
| | CCCATAGCGCGCCAG | | | | | | |
| | GAACA | | | | | | |
| rs53564 | AATCTGTCTCTGTCC | 758 | | | 22 | 42129759 | + |
| 2512 | CCACCGCTGCTTGCC | | | | | | |
| | TTGGGAACGCGGCCC | | | | | | |
| | RAARC | | | | | | |
| rs53564 | AATCTGTCTCTGTCC | 759 | | | 22 | 42129759 | + |
| 2512 | CCACCGCTGCTTGCC | | | | | | |
| | TTGGGAACGCGGCCC | | | | | | |
| | GAAAC | | | | | | |
| rs53564 | AATCTGTCTCTGTCC | 760 | | | 22 | 42129759 | + |
| 2512 | CCACCGCTGCTTGCC | | | | | | |
| | TTGGGAACGCGGCCC | | | | | | |
| | GAAAC | | | | | | |
| rs78459 | TCTCTGTCCCCACCG | 761 | | | 22 | 42129765 | + |
| 009 | CTGCTTGCCTTGGGA | | | | | | |
| | ACGCGGCCCRAARCY | | | | | | |
| | CAGGA | | | | | | |
| rs78459 | CTCTGTCCCCACCGC | 762 | CTCTGTCCCCACCGC | 1903 | 22 | 42129765 | + |
| 009 | TGCTTGCCTTGGGAA | | TGCTTGCCTTGGGAA | | | | |
| | CGCGGCCCGAAACCC | | CGCGGCCCGAAACCC | | | | |
| | AGGAT | | AGGAC | | | | |
| rs78459 | CTCTGTCCCCACCGC | 763 | CTCTGTCCCCACCGC | 1904 | 22 | 42129765 | + |
| 009 | TGCTTGCCTTGGGAA | | TGCTTGCCTTGGGAA | | | | |
| | CGCGGCCCRAARCYC | | CGCGGCCCRAARCYC | | | | |
| | AGGAT | | AGGAC | | | | |
| rs28371 | CTGGTGACCCACGGC | 764 | CTGGTGACCCACGGC | 1905 | 22 | 42129770 | − |
| 706 | GAGGACACCGCCGAC | | GAGGACACCGCCGAC | | | | |
| | CGCCCGCCTGTGCCC | | CGCCCGCCTGTGCCC | | | | |
| | ATCAT | | ATCAC | | | | |
| rs28371 | CTGGTGACCCACGGC | 765 | CTGGTGACCCACGGC | 1906 | 22 | 42129770 | − |
| 706 | GAGGACACCGCCGAC | | GAGGACACCGCCGAC | | | | |
| | CGCCCGCCTGTGCCC | | CGCCCGCCTGTGCCC | | | | |
| | ATCAT | | ATCAC | | | | |
| rs76187 | GCTGCTTGCCTTGGG | 766 | | | 22 | 42129779 | + |
| 628 | AACGCGGCCCGAAAC | | | | | | |
| | CCAGGAYCTGGDWGA | | | | | | |
| | TGGGC | | | | | | |
| rs76187 | CTGCTTGCCTTGGGA | 767 | CTGCTTGCCTTGGGA | 1907 | 22 | 42129779 | + |
| 628 | ACGCGGCCCGAAACC | | ACGCGGCCCGAAACC | | | | |
| | CAGGAYCTGGDWGAT | | CAGGAYCTGGDWGAT | | | | |
| | GGGCA | | GGGCG | | | | |
| rs76187 | GCGCGAGGCGCTGGT | 768 | | | 22 | 42129779 | − |
| 628 | GACCCACGGCGAGGA | | | | | | |
| | SACSGCCGACCGCCC | | | | | | |
| | GCCTR | | | | | | |
| rs28371 | CAGGATCTGGGTGAT | 769 | CAGGATCTGGGTGAT | 1908 | 22 | 42129809 | + |
| 704 | GGGCACAGGCGGGCG | | GGGCACAGGCGGGCG | | | | |
| | GTCGGCGGTGTCCTC | | GTCGGCGGTGTCCTC | | | | |
| | GCCGT | | GCCGC | | | | |
| rs28371 | CAGGATCTGGGTGAT | 770 | CAGGATCTGGGTGAT | 1909 | 22 | 42129809 | + |
| 704 | GGGCACAGGCGGGCG | | GGGCACAGGCGGGCG | | | | |
| | GTCGGCGGTGTCCTC | | GTCGGCGGTGTCCTC | | | | |
| | GCCGT | | GCCGC | | | | |
| rs28371 | CAGGATCTGGGTGAT | 771 | CAGGATCTGGGTGAT | 1910 | 22 | 42129809 | + |
| 704 | GGGCACAGGCGGGCG | | GGGCACAGGCGGGCG | | | | |
| | GTCGGCGGTGTCCTC | | GTCGGCGGTGTCCTC | | | | |
| | GCCGT | | GCCGC | | | | |
| rs28371 | CCTGGACGCCGGTGG | 772 | | | 22 | 42129819 | − |
| 703 | TCGTGCTCAATGGGC | | | | | | |
| | TGGCGGCCGTGCGCG | | | | | | |
| | AGGCG | | | | | | |
| rs28371 | CCTGGACGCCGGTGG | 773 | | | 22 | 42129819 | − |
| 703 | TCGTGCTCAATGGGC | | | | | | |
| | TGGCGGCCGTGCGCG | | | | | | |
| | AGGCG | | | | | | |
| rs26760 | TGATGGGCACAGGCG | 774 | | | 22 | 42129821 | + |
| 8309 | GGCGGTCGGCGGTST | | | | | | |
| | CCTCGCCGYGGGTCA | | | | | | |
| | CCAKC | | | | | | |
| rs26760 | TGATGGGCACAGGCG | 775 | | | 22 | 42129821 | + |
| 8309 | GGCGGTCGGCGGTST | | | | | | |
| | CCTCGCCGYGGGTCA | | | | | | |
| | CCAKC | | | | | | |
| rs26760 | TGATGGGCACAGGCG | 776 | | | 22 | 42129821 | + |
| 8309 | GGCGGTCGGCGGTST | | | | | | |
| | CCTCGCCGYGGGTCA | | | | | | |
| | CCAKC | | | | | | |
| rs26760 | CACAGGCGGGCGGTC | 777 | CACAGGCGGGCGGTC | 1911 | 22 | 42129827 | + |
| 8276 | GGCGGTGTCCTCGCC | | GGCGGTGTCCTCGCC | | | | |
| | GYGGGTCACCAKCRC | | GYGGGTCACCAKCRC | | | | |
| | CTCGC | | CTCGG | | | | |
| rs26760 | CACAGGCGGGCGGTC | 778 | CACAGGCGGGCGGTC | 1912 | 22 | 42129827 | + |
| 8276 | GGCGGTGTCCTCGCC | | GGCGGTGTCCTCGCC | | | | |
| | GTGGGTCACCAGCGC | | GTGGGTCACCAGCGC | | | | |
| | CTCGC | | CTCGG | | | | |
| rs26760 | CAGCTGGCCTGGACG | 779 | CAGCTGGCCTGGACG | 1913 | 22 | 42129827 | − |
| 8276 | CCGGTGGTCGTGCTC | | CCGGTGGTCGTGCTC | | | | |
| | AATGGGCTGGCGGCC | | AATGGGCTGGCGGCC | | | | |
| | GTGCG | | GTGCC | | | | |
| rs26760 | GGCGGTCGGCGGTGT | 780 | | | 22 | 42129836 | + |
| 8310 | CCTCGCCGTGGGTCA | | | | | | |
| | CCAGCGCCTCGCGCA | | | | | | |
| | CGGCC | | | | | | |
| 22_ | CAGCCCATTGAGCAC | 781 | CAGCCCATTGAGCAC | 1914 | 22 | 42129887 | + |
| 42129887 | GACCACCGGCGTCCA | | GACCACCGGCGTCCA | | | | |
| | GGCCAGCTGCAGGCT | | GGCCAGCTGCAGGCT | | | | |
| | GAACA | | GAACG | | | | |
| 22_ | ACAAGAGGCCCTGAC | 782 | | | 22 | 42129887 | − |
| 42129887 | CCTCCCTCTGCAGTT | | | | | | |
| | GCGGCGCCGCTTCGG | | | | | | |
| | GGACG | | | | | | |
| 22_ | ACAAGAGGCCCTGAC | 783 | | | 22 | 42129887 | − |
| 42129887 | CCTCCCTCTGCASTT | | | | | | |
| | GYGGCGCCGCTTCGG | | | | | | |
| | GGACG | | | | | | |
| rs26760 | CTGGGGTGATCCTGG | 784 | | | 22 | 42129906 | − |
| 8311 | CTTGACAAGAGGCCC | | | | | | |
| | TGACCCTCCCTCTGC | | | | | | |
| | ASTTG | | | | | | |
| rs26760 | CTGGGGTGATCCTGG | 785 | | | 22 | 42129906 | − |
| 8311 | CTTGACAAGAGGCCC | | | | | | |
| | TGACCCTCCCTCTGC | | | | | | |
| | AGTTG | | | | | | |
| rs26760 | CTGGGGTGATCCTGG | 786 | | | 22 | 42129906 | − |
| 8311 | CTTGACAAGAGGCCC | | | | | | |
| | TGACCCTCCCTCTGC | | | | | | |
| | AGTTG | | | | | | |
| rs20137 | AGTCTGGGGTGATCC | 787 | AGTCTGGGGTGATCC | 1915 | 22 | 42129910 | − |
| 7835 | TGGCTTGACAAGAGG | | TGGCTTGACAAGAGG | | | | |
| | CCCTGACCCTCCCTC | | CCCTGACCCTCCCTC | | | | |
| | TGCAG | | TGCAC | | | | |
| rs20137 | AGTCTGGGGTGATCC | 788 | AGTCTGGGGTGATCC | 1916 | 22 | 42129910 | − |
| 7835 | TGGCTTGACAAGAGG | | TGGCTTGACAAGAGG | | | | |
| | CCCTGACCCTCCCTC | | CCCTGACCCTCCCTC | | | | |
| | TGCAG | | TGCAC | | | | |
| rs11820 | CGAAGCAGTATGGTG | 789 | | | 22 | 42130667 | + |
| 3758 | TGTTCTGGAAGTCCA | | | | | | |
| | CATGCAGCAGGTTGC | | | | | | |
| | CCAGC | | | | | | |
| rs11820 | GAAGCAGTATGGTGT | 790 | GAAGCAGTATGGTGT | 1917 | 22 | 42130667 | + |
| 3758 | GTTCTGGAAGTCCAC | | GTTCTGGAAGTCCAC | | | | |
| | ATGCAGCAGGTTGCC | | ATGCAGCAGGTTGCC | | | | |
| | CAGCT | | CAGCC | | | | |
| rs50308 | GGCGCCAACGCTGGG | 791 | | | 22 | 42130668 | − |
| 62 | CTGCACGCTACCCAC | | | | | | |
| | CAGGCCCCCTGCCAC | | | | | | |
| | TGCCC | | | | | | |
| rs50308 | GGCGCCAACGCTGGG | 792 | | | 22 | 42130668 | − |
| 62 | CTGCACGCTACCCAC | | | | | | |
| | CAGGCCCCCTGCCAC | | | | | | |
| | TGCCC | | | | | | |
| rs10658 | GTCCACATGCAGCAG | 793 | | | 22 | 42130692 | + |
| 52 | GTTGCCCAGCCYGGG | | | | | | |
| | CAGTGGCAGGGGRCC | | | | | | |
| | TGGYG | | | | | | |
| rs10658 | GTCCACATGCAGCAG | 794 | | | 22 | 42130692 | + |
| 52 | GTTGCCCAGCCCGGG | | | | | | |
| | CAGTGGCAGGGGGCC | | | | | | |
| | TGGTG | | | | | | |
| rs13810 | TGATAGTGGCCATCT | 795 | | | 22 | 42130710 | − |
| 0349 | TCCTGCTCCTGGTGG | | | | | | |
| | ACCTGATGCACCGGC | | | | | | |
| | GCCAA | | | | | | |
| rs13810 | TGATAGTGGCCATCT | 796 | | | 22 | 42130710 | − |
| 0349 | TCCTGCTCCTGGTGG | | | | | | |
| | ACCTGATGCACCGGC | | | | | | |
| | GCCAA | | | | | | |
| rs13810 | TGATAGTGGCCATCT | 797 | | | 22 | 42130710 | − |
| 0349 | TCCTGCTCCTGGTGG | | | | | | |
| | ACCTGATGCACYRGC | | | | | | |
| | RCCAA | | | | | | |
| rs28371 | GCCGTGATAGTGGCC | 798 | GCCGTGATAGTGGCC | 1918 | 22 | 42130715 | − |
| 696 | ATCTTCCTGCTCCTG | | ATCTTCCTGCTCCTG | | | | |
| | GTGGACCTGATGCAC | | GTGGACCTGATGCAC | | | | |
| | CGGCA | | CGGCG | | | | |
| rs26760 | GGGCAGTGGCAGGGG | 799 | | | 22 | 42130719 | + |
| 8313 | GCCTGGTGGGTAGCG | | | | | | |
| | TGCAGCCCAGCRTTG | | | | | | |
| | GYGCC | | | | | | |
| rs26760 | GGGCAGTGGCAGGGG | 800 | | | 22 | 42130719 | + |
| 8313 | GCCTGGTGGGTAGCG | | | | | | |
| | TGCAGCCCAGCRTTG | | | | | | |
| | GYGCC | | | | | | |
| rs26760 | GGGCAGTGGCAGGGG | 801 | | | 22 | 42130719 | + |
| 8313 | GCCTGGTGGGTAGCG | | | | | | |
| | TGCAGCCCAGCRTTG | | | | | | |
| | GYGCC | | | | | | |
| 22_ | AGGGGGCCTGGTGGG | 802 | | | 22 | 42130727 | + |
| 42130727 | TAGCGTGCAGCCCAG | | | | | | |
| | CGTTGGCGCCGGTGC | | | | | | |
| | ATCAG | | | | | | |
| 22_ | AGGGGGCCTGGTGGG | 803 | | | 22 | 42130727 | + |
| 42130727 | TAGCGTGCAGCCCAG | | | | | | |
| | CGTTGGYGCYRGTGC | | | | | | |
| | ATCAG | | | | | | |
| 22_ | CACTGGTGCCCCTGG | 804 | | | 22 | 42130727 | − |
| 42130727 | CCGTGATAGTGGCCA | | | | | | |
| | TCTTCCTGCTCCTGG | | | | | | |
| | TGGAC | | | | | | |
| rs76925 | CATTTGGTAGTGAGG | 805 | | | 22 | 42130761 | − |
| 8 | CAGGTATGGGGCTAG | | | | | | |
| | AAGCACTGGTGCCCC | | | | | | |
| | TGGCC | | | | | | |
| rs76925 | CATTTGGTAGTGAGG | 806 | | | 22 | 42130761 | − |
| 8 | CAGGTATGGGGCTAG | | | | | | |
| | AAGCACTGGTGCCCC | | | | | | |
| | TGGCC | | | | | | |
| rs72549 | TCCAGAGGAGCCCAT | 807 | | | 22 | 42130773 | − |
| 358 | TTGGTAGTGAGGCAG | | | | | | |
| | GTATGGGGCTAGAAG | | | | | | |
| | CACTG | | | | | | |
| rs72549 | CCAGAGGAGCCCATT | 808 | CCAGAGGAGCCCATT | 1919 | 22 | 42130773 | − |
| 358 | TGGTAGTGAGGCAGG | | TGGTAGTGAGGCAGG | | | | |
| | TATGGGGCTAGAAGC | | TATGGGGCTAGAAGC | | | | |
| | ACTGA | | ACTGG | | | | |
| rs72549 | TCCAGAGGAGCCCAT | 809 | | | 22 | 42130773 | − |
| 358 | TTGGTAGTGAGGCAG | | | | | | |
| | GTATGGGGCTAGAAG | | | | | | |
| | CACTG | | | | | | |
| rs77379 | GTGTGTCCAGAGGAG | 810 | | | 22 | 42130778 | − |
| 0593 | CCCATTTGGTAGTGA | | | | | | |
| | GGCAGGTATGGGGCT | | | | | | |
| | AGAAG | | | | | | |
| rs11358 | ACTGGACAGCCCCGG | 811 | ACTGGACAGCCCCGG | 1920 | 22 | 42522613 | − |
| 40 | CCCAGCCACCATGGT | | CCCAGCCACCATGGT | | | | |
| | GTCTTTGCTTTCCTG | | GTCTTTGCTTTCCTG | | | | |
| | GTGAC | | GTGAG | | | | |
| rs11358 | ACTGGACAGCCCCGG | 812 | ACTGGACAGCCCCGG | 1921 | 22 | 42522613 | − |
| 40 | CCCAGCCACCATGGT | | CCCAGCCACCATGGT | | | | |
| | GTCTTTGCTTTCCTG | | GTCTTTGCTTTCCTG | | | | |
| | GTGAC | | GTGAG | | | | |
| rs11358 | ACTGGACAGCCCCGG | 813 | ACTGGACAGCCCCGG | 1922 | 22 | 42522613 | − |
| 40 | CCCAGCCACCATGGT | | CCCAGCCACCATGGT | | | | |
| | GTCTTTGCTTTCCTG | | GTCTTTGCTTTCCTG | | | | |
| | GTGAC | | GTGAG | | | | |
| rs11358 | GCGGGGCACAGCACA | 814 | | | 22 | 42522629 | + |
| 38 | AAGCTCATAGGGGGA | | | | | | |
| | TGGGGTCACCAGGAA | | | | | | |
| | AGCAA | | | | | | |
| rs28371 | AGCACAAAGCTCATA | 815 | | | 22 | 42522638 | + |
| 735 | GGGGGATGGGGTCAC | | | | | | |
| | CAGGAAAGCAAAGAC | | | | | | |
| | ACCAT | | | | | | |
| rs28371 | AGCACAAAGCTCATA | 816 | | | 22 | 42522638 | + |
| 735 | GGGGGATGGGGTCAC | | | | | | |
| | CAGGAAAGCAAAGAC | | | | | | |
| | ACCAT | | | | | | |
| rs26760 | AGAAGAGGAAGAGCT | 817 | | | 22 | 42522751 | + |
| 8319 | CCATGCGGGCCAGGG | | | | | | |
| | GCTCCCCGAGGCATG | | | | | | |
| | CACGG | | | | | | |
| rs28371 | CGGTGCTGAAGGATG | 818 | | | 22 | 42522916 | − |
| 733 | AGGCCGTCTGGGAGA | | | | | | |
| | AGCCCTTCCGCTTCC | | | | | | |
| | ACCCC | | | | | | |
| rs28371 | CAGGAAGGCCTCCGG | 819 | | | 22 | 42522916 | + |
| 733 | CTTCACAAAGTGGCC | | | | | | |
| | CTGGGCATCCAGGAA | | | | | | |
| | GTGTT | | | | | | |
| 22_ | CATCTTCTGCCCAGG | 820 | | | 22 | 42522958 | − |
| 42126956 | GAACGACACTCATCA | | | | | | |
| | CCAACCTGTCATCGG | | | | | | |
| | TGCTG | | | | | | |
| rs77312 | CTGGGTGTGACCCAT | 821 | CTGGGTGTGACCCAT | 1923 | 22 | 42523459 | − |
| 092 | ATGACATCCCGTGAC | | ATGACATCCCGTGAC | | | | |
| | ATCGAAGTACAGGGC | | ATCGAAGTACAGGGC | | | | |
| | TTCCG | | TTCCC | | | | |
| rs77312 | CCTGGGTGTGACCCA | 822 | | | 22 | 42523459 | − |
| 092 | TATGACATCCCGTGA | | | | | | |
| | CATCGAAGTACAGGG | | | | | | |
| | CTTCC | | | | | | |
| rs72549 | TGGGTGACCAGGCTC | 823 | | | 22 | 42523533 | − |
| 346 | ACATGCCCTACACCA | | | | | | |
| | CTGCCGTGATTCATG | | | | | | |
| | AGGTG | | | | | | |
| rs72549 | TGGGTGACCAGGCTC | 824 | | | 22 | 42523533 | − |
| 346 | ACATGCCCTACACCA | | | | | | |
| | CTGCCGTGATTCATG | | | | | | |
| | AGGTG | | | | | | |
| rs72549 | TGGGTGACCAGGCTC | 825 | | | 22 | 42523533 | − |
| 346 | ACATGCCCTACACCA | | | | | | |
| | CTGCCGTGATTCATG | | | | | | |
| | AGGTG | | | | | | |
| rs20210 | GGGGGACGATGTCCC | 826 | | | 22 | 42523558 | + |
| 2799 | CAAAGCGCTGCACCT | | | | | | |
| | CATGAATCACGGCAG | | | | | | |
| | TGGTG | | | | | | |
| rs20210 | GGGGGACGATGTCCC | 827 | | | 22 | 42523558 | + |
| 2799 | CAAAGCGCTGCACCT | | | | | | |
| | CATGAATCACGGCAG | | | | | | |
| | TGGTG | | | | | | |
| rs76088 | GAATCACGGCAGTGG | 828 | | | 22 | 42523591 | + |
| 846 | TGTAGGGCATGTGAG | | | | | | |
| | CCTGGTCACCCATCT | | | | | | |
| | CTGGT | | | | | | |
| rs74871 | CATTGTGGGGACGCA | 829 | | | 22 | 42523612 | − |
| 2690 | TGTCTGTCCAGGCCG | | | | | | |
| | TGTCCAACAGGAGAT | | | | | | |
| | CGACG | | | | | | |
| rs72549 | GTGCTGACCCATTGT | 830 | | | 22 | 42523621 | − |
| 348 | GGGGACGCATGTCTG | | | | | | |
| | TCCAGGCCGTGTCCA | | | | | | |
| | ACAGG | | | | | | |
| rs72549 | GTGCTGACCCATTGT | 831 | | | 22 | 42523621 | − |
| 348 | GGGGACGCATGTCTG | | | | | | |
| | TCCAGGCCGTGTCCA | | | | | | |
| | ACAGG | | | | | | |
| rs72549 | GTGCTGACCCATTGT | 832 | | | 22 | 42523621 | − |
| 348 | GGGGACGCATGTCTG | | | | | | |
| | TCCAGGCCGTGTCCA | | | | | | |
| | ACAGG | | | | | | |
| rs16947 | CTGCTCAGGCCAAGG | 833 | | | 22 | 42523943 | − |
| | GGAACCCTGAGAGCA | | | | | | |
| | GCTTCAATGATGAGA | | | | | | |
| | ACCTG | | | | | | |
| rs16947 | CTGCTCAGGCCAAGG | 834 | | | 22 | 42523943 | − |
| | GGAACCCTGAGAGCA | | | | | | |
| | GCTTCAATGATGAGA | | | | | | |
| | ACCTG | | | | | | |
| rs26760 | TGTCCCGAGTATGCT | 835 | | | 22 | 42523965 | − |
| 8279 | CTCGGCCCTGCTCAG | | | | | | |
| | GCCAAGGGGAACCCT | | | | | | |
| | GAGAG | | | | | | |
| rs11358 | GACCCAGCCCAGCCC | 836 | GACCCAGCCCAGCCC | 1924 | 22 | 42524183 | − |
| 28 | CCCCGAGACCTGACT | | CCCCGAGACCTGACT | | | | |
| | GAGGCCTTCCTGGCA | | GAGGCCTTCCTGGCA | | | | |
| | GAGAA | | GAGAT | | | | |
| rs77913 | CCCACCACCCTTGCC | 837 | | | 22 | 42524187 | + |
| 725 | CCCCACCGTGGCAGC | | | | | | |
| | CACTCTCACCTTCTC | | | | | | |
| | CATCT | | | | | | |
| rs77913 | CCCACCACCCTTGCC | 838 | | | 22 | 42524187 | + |
| 725 | CCCCACCGTGGCAGC | | | | | | |
| | CACTCTCACCTTCTC | | | | | | |
| | CATCT | | | | | | |
| rs72549 | CACCGTGGCAGCCAC | 839 | | | 22 | 42524203 | + |
| 351 | TCTCACCTTCTCCAT | | | | | | |
| | CTCTGCCAGGAAGGC | | | | | | |
| | CTCAG | | | | | | |
| rs26760 | CTGCCAGGAAGGCCT | 840 | | | 22 | 42524237 | + |
| 8297 | CAGTCAGGTCTCGGG | | | | | | |
| | GGGGCTGGGCTGGGT | | | | | | |
| | CCCAG | | | | | | |
| rs26760 | CTGCCAGGAAGGCCT | 841 | | | 22 | 42524237 | + |
| 8297 | CAGTCAGGTCTCGGG | | | | | | |
| | GGGGCTGGGCTGGGT | | | | | | |
| | CCCAG | | | | | | |
| rs19953 | TCCTCGGTCTCTCGC | 842 | | | 22 | 42524814 | + |
| 5154 | TCCGCACCTCGCGCA | | | | | | |
| | GAAAGCCCGACTCCT | | | | | | |
| | CCTTC | | | | | | |
| rs38920 | CACGTTGCTCACGGC | 843 | | | 22 | 42524947 | + |
| 97 | TTTGTCCAAGAGACC | | | | | | |
| | GTTGGGGCGAAAGGG | | | | | | |
| | GCGTC | | | | | | |
| rs26760 | CCCATCACCCACCGG | 844 | | | 22 | 42525073 | + |
| 8302 | AGTGGTTGGCGAAGG | | | | | | |
| | CGGCACAAAGGCAGG | | | | | | |
| | CGGCC | | | | | | |
| rs26760 | CCCATCACCCACCGG | 845 | | | 22 | 42525073 | + |
| 8302 | AGTGGTTGGCGAAGG | | | | | | |
| | CGGCACAAAGGCAGG | | | | | | |
| | CGGCC | | | | | | |
| rs28371 | TCACCCACCGGAGTG | 846 | | | 22 | 42525077 | + |
| 710 | GTTGGCGAAGGCGGC | | | | | | |
| | ACAAAGGCAGGCGGC | | | | | | |
| | CTCCT | | | | | | |
| rs78482 | TGGTTGGCGAAGGCG | 847 | TGGTTGGCGAAGGCG | 1925 | 22 | 42525089 | + |
| 768 | GCACAAAGGCAGGCG | | GCACAAAGGCAGGCG | | | | |
| | GCCTCCTCGGTCACC | | GCCTCCTCGGTCACC | | | | |
| | CACTC | | CACTG | | | | |
| rs78482 | TGGTTGGCGAAGGCG | 848 | TGGTTGGCGAAGGCG | 1926 | 22 | 42525089 | + |
| 768 | GCACAAAGGCAGGCG | | GCACAAAGGCAGGCG | | | | |
| | GCCTCCTCGGTCACC | | GCCTCCTCGGTCACC | | | | |
| | CACTC | | CACTG | | | | |
| rs11358 | GGTGGAGACGGAGAA | 849 | | | 22 | 42525176 | + |
| 23 | GCGCCTCTGCTCGCG | | | | | | |
| | CCACGCGGGCCCATA | | | | | | |
| | GCGCG | | | | | | |
| rs11358 | GGTGGAGACGGAGAA | 850 | | | 22 | 42525176 | + |
| 23 | GCGCCTCTGCTCGCG | | | | | | |
| | CCACGCGGGCCCATA | | | | | | |
| | GCGCG | | | | | | |
| rs11358 | ACGGAGAAGCGCCTC | 851 | ACGGAGAAGCGCCTC | 1927 | 22 | 42525182 | + |
| 22 | TGCTCGCGCCACGCG | | TGCTCGCGCCACGCG | | | | |
| | GGCCCATAGCGCGCC | | GGCCCATAGCGCGCC | | | | |
| | AGGAA | | AGGAT | | | | |
| rs11358 | CTAATGCCTTCATGG | 852 | CTAATGCCTTCATGG | 1928 | 22 | 42525182 | − |
| 22 | CCACGCGCACGTGCC | | CCACGCGCACGTGCC | | | | |
| | CGTCCCACCCCCAGG | | CGTCCCACCCCCAGG | | | | |
| | GGTGT | | GGTGA | | | | |
| rs28371 | CTGGTGACCCACGGC | 853 | CTGGTGACCCACGGC | 1929 | 22 | 42525772 | − |
| 706 | GAGGACACCGCCGAC | | GAGGACACCGCCGAC | | | | |
| | CGCCCGCCTGTGCCC | | CGCCCGCCTGTGCCC | | | | |
| | ATCAT | | ATCAC | | | | |
| rs26760 | CTGCTTGCCTTGGGA | 854 | | | 22 | 42525782 | + |
| 8308 | ACGCGGCCCGAAACC | | | | | | |
| | CAGGATCTGGGTGAT | | | | | | |
| | GGGCA | | | | | | |
| rs26760 | CTGCTTGCCTTGGGA | 855 | | | 22 | 42525782 | + |
| 8308 | ACGCGGCCCGAAACC | | | | | | |
| | CAGGATCTGGGTGAT | | | | | | |
| | GGGCA | | | | | | |
| rs26760 | CTGCTTGCCTTGGGA | 856 | | | 22 | 42525782 | + |
| 8308 | ACGCGGCCCGAAACC | | | | | | |
| | CAGGATCTGGGTGAT | | | | | | |
| | GGGCA | | | | | | |
| rs28371 | CCTGGACGCCGGTGG | 857 | | | 22 | 42525821 | − |
| 703 | TCGTGCTCAATGGGC | | | | | | |
| | TGGCGGCCGTGCGCG | | | | | | |
| | AGGCG | | | | | | |
| rs26760 | GGCGGTCGGCGGTGT | 858 | | | 22 | 42525838 | + |
| 8310 | CCTCGCCGTGGGTCA | | | | | | |
| | CCAGCGCCTCGCGCA | | | | | | |
| | CGGCC | | | | | | |
| rs26760 | GGCGGTCGGCGGTGT | 859 | | | 22 | 42525838 | + |
| 8310 | CCTCGCCGTGGGTCA | | | | | | |
| | CCAGCGCCTCGCGCA | | | | | | |
| | CGGCC | | | | | | |
| rs20137 | AGTCTGGGGGGATCC | 860 | AGTCTGGGGGGATCC | 1930 | 22 | 42525912 | − |
| 7835 | TGGCTTGACAAGAGG | | TGGCTTGACAAGAGG | | | | |
| | CCCTGACCCTCCCTC | | CCCTGACCCTCCCTC | | | | |
| | TGCAG | | TGCAC | | | | |
| rs77467 | CCTCACCTGGTCGAA | 861 | | | 22 | 42526656 | + |
| 1100 | GCAGTATGGTGTGTT | | | | | | |
| | CTGGAAGTCCACATG | | | | | | |
| | CAGCA | | | | | | |
| rs77467 | CCTCACCTGGTCGAA | 862 | | | 22 | 42526656 | + |
| 1100 | GCAGTATGGTGTGTT | | | | | | |
| | CTGGAAGTCCACATG | | | | | | |
| | CAGCA | | | | | | |
| rs77467 | CCTCACCTGGTCGAA | 863 | | | 22 | 42526656 | + |
| 1100 | GCAGTATGGTGTGTT | | | | | | |
| | CTGGAAGTCCACATG | | | | | | |
| | CAGCA | | | | | | |
| rs50308 | GAAGCAGTATGGTGT | 864 | | | 22 | 42526670 | + |
| 62 | GTTCTGGAAGTCCAC | | | | | | |
| | ATGCAGCAGGTTGCC | | | | | | |
| | CAGCC | | | | | | |
| rs10658 | GTCCACATGCAGCAG | 865 | | | 22 | 42526694 | + |
| 52 | GTTGCCCAGCCCGGG | | | | | | |
| | CAGTGGCAGGGGGCC | | | | | | |
| | TGGTG | | | | | | |
| rs28371 | GGCCGTGATAGTGGC | 866 | | | 22 | 42526717 | − |
| 696 | CATCTTCCTGCTCCT | | | | | | |
| | GGTGGACCTGATGCA | | | | | | |
| | CCGGC | | | | | | |
| rs28371 | GGCCGTGATAGTGGC | 867 | | | 22 | 42526717 | − |
| 696 | CATCTTCCTGCTCCT | | | | | | |
| | GGTGGACCTGATGCA | | | | | | |
| | CCGGC | | | | | | |
| rs76925 | CATTTGGTAGTGAGG | 868 | | | 22 | 42526763 | − |
| 8 | CAGGTATGGGGCTAG | | | | | | |
| | AAGCACTGGTGCCCC | | | | | | |
| | TGGCC | | | | | | |
| rs77379 | GTGTGTCCAGAGGAG | 869 | | | 22 | 42526780 | − |
| 0593 | CCCATTTGGTAGTGA | | | | | | |
| | GGCAGGTATGGGGCT | | | | | | |
| | AGAAG | | | | | | |
| rs77379 | GTGTGTCCAGAGGAG | 870 | | | 22 | 42526780 | − |
| 0593 | CCCATTTGGTAGTGA | | | | | | |
| | GGCAGGTATGGGGCT | | | | | | |
| | AGAAG | | | | | | |
| rs11423 | TCAGTGTGATTTTAT | 871 | | | 6 | 18130687 | + |
| 45 | TTTATCTATGTCTCA | | | | | | |
| | TTTACTTTTCTGTAA | | | | | | |
| | GTAGA | | | | | | |
| rs11423 | TGAAGAACGACATAA | 872 | | | 6 | 18130687 | − |
| 45 | AAGTTGGGGAATTGA | | | | | | |
| | CTGTCTTTTTGAAAA | | | | | | |
| | GTTAT | | | | | | |
| rs11423 | GAAGAACGACATAAA | 873 | GAAGAACGACATAAA | 1931 | 6 | 18130687 | − |
| 45 | AGTTGGGGAATTGAC | | AGTTGGGGAATTGAC | | | | |
| | TGTCTTTTTGAAAAG | | TGTCTTTTTGAAAAG | | | | |
| | TTATA | | TTATG | | | | |
| rs18005 | CCTGATGTCATTCTT | 874 | | | 6 | 18130781 | − |
| 84 | CATAGTATTTTAACA | | | | | | |
| | TGTTACTCTTTCTTG | | | | | | |
| | TTTCA | | | | | | |
| rs18005 | CCTGATGTCATTCTT | 875 | | | 6 | 18130781 | − |
| 84 | CATAGTATTTTAACA | | | | | | |
| | TGTTACTCTTTCTTG | | | | | | |
| | TTTCA | | | | | | |
| rs18005 | CCTGATGTCATTCTT | 876 | | | 6 | 18130781 | − |
| 84 | CATAGTATTTTAACA | | | | | | |
| | TGTTACTCTTTCTTG | | | | | | |
| | TTTCA | | | | | | |
| rs74423 | CTGTGTAGAGAAATG | 877 | CTGTGTAGAGAAATG | 1932 | 6 | 18133884 | − |
| 290 | TAACAAATACCTTCT | | TAACAAATACCTTCT | | | | |
| | TGTGTTCTTTGTAGC | | TGTGTTCTTTGTAGC | | | | |
| | TATGC | | TATGG | | | | |
| rs74423 | CTGTGTAGAGAAATG | 878 | CTGTGTAGAGAAATG | 1933 | 6 | 18133884 | − |
| 290 | TAACAAATACCTTCT | | TAACAAATACCTTCT | | | | |
| | TGTGTTCTTTGTAGC | | TGTGTTCTTTGTAGC | | | | |
| | TATGC | | TATGG | | | | |
| rs74423 | CTGTGTAGAGAAATG | 879 | CTGTGTAGAGAAATG | 1934 | 6 | 18133884 | − |
| 290 | TAACAAATACCTTCT | | TAACAAATACCTTCT | | | | |
| | TGTGTTCTTTGTAGC | | TGTGTTCTTTGTAGC | | | | |
| | TATGG | | TATGC | | | | |
| rs93335 | GGAGATACTGAAACT | 880 | | | 6 | 18133890 | + |
| 70 | TCTTTCCCAGGAGGG | | | | | | |
| | AAAACATTGTATCTG | | | | | | |
| | CATAG | | | | | | |
| rs93335 | GGAGATACTGAAACT | 881 | | | 6 | 18133890 | + |
| 70 | TCTTTCCCAGGAGGG | | | | | | |
| | AAAACATTGTATCTG | | | | | | |
| | CATAG | | | | | | |
| rs93335 | CCTTTGCCTGTGTAG | 882 | | | 6 | 18133890 | − |
| 70 | AGAAATGTAACAAAT | | | | | | |
| | ACCTTCTTGTGTTCT | | | | | | |
| | TTGTA | | | | | | |
| rs18004 | TTTCTGGTAGGACAA | 883 | | | 6 | 18138997 | − |
| 60 | ATATTGGCAAATTTG | | | | | | |
| | ACATGATTTGGGATA | | | | | | |
| | GAGGA | | | | | | |
| rs18004 | TTTCTGGTAGGACAA | 884 | | | 6 | 18138997 | − |
| 60 | ATATTGGCAAATTTG | | | | | | |
| | ACATGATTTGGGATA | | | | | | |
| | GAGGA | | | | | | |
| rs18004 | TTTCTGGTAGGACAA | 885 | | | 6 | 18138997 | − |
| 60 | ATATTGGCAAATTTG | | | | | | |
| | ACATGATTTGGGATA | | | | | | |
| | GAGGA | | | | | | |
| rs72552 | AAGTGCAGATGTAGT | 886 | | | 6 | 18139689 | + |
| 738 | ATTCAACCTACCTGG | | | | | | |
| | GAAGATCAAAAATAC | | | | | | |
| | TGCAA | | | | | | |
| rs72552 | AAGTGCAGATGTAGT | 887 | | | 6 | 18139689 | + |
| 738 | ATTCAACCTACCTGG | | | | | | |
| | GAAGATCAAAAATAC | | | | | | |
| | TGCAA | | | | | | |
| rs72552 | AAGTGCAGATGTAGT | 888 | | | 6 | 18139689 | + |
| 738 | ATTCAACCTACCTGG | | | | | | |
| | GAAGATCAAAAATAC | | | | | | |
| | TGCAA | | | | | | |
| rs18004 | ATCCCAAGTTCACTG | 889 | ATCCCAAGTTCACTG | 1935 | 6 | 18143724 | + |
| 62 | ATTTCCACACCAACT | | ATTTCCACACCAACT | | | | |
| | ACACTGTGTCCCCGG | | ACACTGTGTCCCCGG | | | | |
| | TCTGG | | TCTGC | | | | |
| rs18004 | TCATTTGAAAACATA | 890 | TCATTTGAAAACATA | 1936 | 6 | 18143724 | − |
| 62 | ATTTAAGTGTAAATG | | ATTTAAGTGTAAATG | | | | |
| | TATGATTTTATGCAG | | TATGATTTTATGCAG | | | | |
| | GTTTC | | GTTTG | | | | |
| rs18004 | ATCCCAAGTTCACTG | 891 | ATCCCAAGTTCACTG | 1937 | 6 | 18143724 | + |
| 62 | ATTTCCACACCAACT | | ATTTCCACACCAACT | | | | |
| | ACACTGTGTCCCCGG | | ACACTGTGTCCCCGG | | | | |
| | TCTGG | | TCTGC | | | | |
| rs26760 | CGTAGGCACGGAAGA | 892 | | | 6 | 18149126 | − |
| 7275 | CATATGCTTGTGAGA | | | | | | |
| | CAAAGGTGTCTCTGA | | | | | | |
| | AACTA | | | | | | |
| rs26760 | CGTAGGCACGGAAGA | 893 | | | 6 | 18149126 | − |
| 7275 | CATATGCTTGTGAGA | | | | | | |
| | CAAAGGTGTCTCTGA | | | | | | |
| | AACTA | | | | | | |
| rs26760 | CGTAGGCACGGAAGA | 894 | | | 6 | 18149126 | − |
| 7275 | CATATGCTTGTGAGA | | | | | | |
| | CAAAGGTGTCTCTGA | | | | | | |
| | AACTA | | | | | | |
| rs93335 | ACGTAGGCACGGAAG | 895 | | | 6 | 18149127 | − |
| 69 | ACATATGCTTGTGAG | | | | | | |
| | ACAAAGGTGTCTCTG | | | | | | |
| | AAACT | | | | | | |
| rs93335 | ACGTAGGCACGGAAG | 896 | | | 6 | 18149127 | − |
| 69 | ACATATGCTTGTGAG | | | | | | |
| | ACAAAGGTGTCTCTG | | | | | | |
| | AAACT | | | | | | |
| rs93335 | ACGTAGGCACGGAAG | 897 | | | 6 | 18149127 | − |
| 69 | ACATATGCTTGTGAG | | | | | | |
| | ACAAAGGTGTCTCTG | | | | | | |
| | AAACT | | | | | | |
| rs38690 | CAGGGTCTAGTAGAT | 898 | | | 6 | 30035987 | + |
| 66 | CACATGATTCATCAG | | | | | | |
| | AGGACTTGAAATACA | | | | | | |
| | TGCTG | | | | | | |
| rs38690 | CAGGGTCTAGTAGAT | 899 | | | 6 | 30035987 | + |
| 66 | CACATGATTCATCAG | | | | | | |
| | AGGACTTGAAATACA | | | | | | |
| | TGCTG | | | | | | |
| rs38690 | CAGGGTCTAGTAGAT | 2198 | | | 6 | 30035987 | + |
| 66 | CACATGATTCATCAG | | | | | | |
| | AGGACTTGAAATACA | | | | | | |
| | TGCTG | | | | | | |
| rs92637 | TTTACAAGGACCCCA | 2199 | | | 6 | 31138722 | + |
| 26 | GCTCCTTAACACAGA | | | | | | |
| | TCCCAGCTCCGAGGA | | | | | | |
| | AACTC | | | | | | |
| rs92637 | TTTACAAGGACCCCA | 2200 | | | 6 | 31138722 | + |
| 26 | GCTCCTTAACACAGA | | | | | | |
| | TCCCAGCTCCGAGGA | | | | | | |
| | AACTC | | | | | | |
| rs92637 | TTTACAAGGACCCCA | 2201 | | | 6 | 31138722 | + |
| 26 | GCTCCTTAACACAGA | | | | | | |
| | TCCCAGCTCCGAGGA | | | | | | |
| | AACTC | | | | | | |
| rs23950 | CCTTAAAAGGGGACA | 2202 | | | 6 | 31464003 | − |
| 29 | AATGAGTGCCCATTG | | | | | | |
| | AACTACACATTACAG | | | | | | |
| | CTGCC | | | | | | |
| rs23950 | CCTTAAAAGGGGACA | 2203 | | | 6 | 31464003 | − |
| 29 | AATGAGTGCCCATTG | | | | | | |
| | AACTACACATTACAG | | | | | | |
| | CTGCC | | | | | | |
| rs23950 | CCTTAAAAGGGGACA | 2204 | | | 6 | 31464003 | − |
| 29 | AATGAGTGCCCATTG | | | | | | |
| | AACTACACATTACAG | | | | | | |
| | CTGCC | | | | | | |
| rs80282 | TACTTCATCAAATTT | 2205 | | | 7 | 117174372 | − |
| 562 | GTTCAGGTTGTTGGA | | | | | | |
| | AAGGAGACTAACAAG | | | | | | |
| | TTGTC | | | | | | |
| rs11399 | TTTGGTAATAGGACA | 2206 | | | 7 | 117227832 | + |
| 3959 | TCTCCAAGTTTGCAG | | | | | | |
| | AGAAAGACAATATAG | | | | | | |
| | TTCTT | | | | | | |
| rs12190 | CAGAGAAAGACAATA | 2207 | | | 7 | 117227859 | + |
| 9013 | TAGTTCTTGGAGAAG | | | | | | |
| | GTGGAATCACACTGA | | | | | | |
| | GTGGA | | | | | | |
| rs12190 | CAGAGAAAGACAATA | 900 | | | 7 | 117227859 | + |
| 9013 | TAGTTCTTGGAGAAG | | | | | | |
| | GTGGAATCACACTGA | | | | | | |
| | GTGGA | | | | | | |
| rs20032 | TCACTCATCTTGTTA | 901 | | | 7 | 117251700 | + |
| 1110 | CAAGCTTAAAAGGAC | | | | | | |
| | TATGGACACTTCGTG | | | | | | |
| | CCTTC | | | | | | |
| rs74503 | CACTTTTACCTTATA | 902 | | | 7 | 117282526 | + |
| 330 | GGTGGGCCTCTTGGG | | | | | | |
| | AAGAACTGGATCAGG | | | | | | |
| | GAAGA | | | | | | |
| rs12190 | TATAGGTGGGCCTCT | 903 | | | 7 | 117282537 | + |
| 9041 | TGGGAAGAACTGGAT | | | | | | |
| | CAGGGAAGAGTACTT | | | | | | |
| | TGTTA | | | | | | |
| rs19392 | TCTTCGCCTTACTGA | 904 | | | 7 | 117304824 | − |
| 2525 | GAACAGATCTAGCCA | | | | | | |
| | AGCACATCAACTGCT | | | | | | |
| | TGTGG | | | | | | |
| rs39750 | GAAAAAAAGTTTGGA | 905 | | | 7 | 117480095 | − |
| 8328 | GACAACGCTGGCCTT | | | | | | |
| | TTCCAGAGGCGACCT | | | | | | |
| | CTGCA | | | | | | |
| rs39750 | GGAGCTTGAGCCCAG | 906 | | | 7 | 117480095 | + |
| 8328 | ACGGCCCTAGCAGGG | | | | | | |
| | ACCCCAGCGCCCGAG | | | | | | |
| | AGACC | | | | | | |
| rs39750 | GAAAAAAAGTTTGGA | 907 | | | 7 | 117480095 | − |
| 8328 | GACAACGCTGGCCTT | | | | | | |
| | TTCCAGAGGCGACCT | | | | | | |
| | CTGCA | | | | | | |
| rs15102 | TAAACAATGTACATG | 908 | TAAACAATGTACATG | 1938 | 7 | 117504336 | − |
| 0603 | AACATACCTTTCCAA | | AACATACCTTTCCAA | | | | |
| | TTTTTCAGATAGATT | | TTTTTCAGATAGATT | | | | |
| | GTCAA | | GTCAG | | | | |
| rs15102 | TAAACAATGTACATG | 909 | TAAACAATGTACATG | 1939 | 7 | 117504336 | − |
| 0603 | AACATACCTTTCCAA | | AACATACCTTTCCAA | | | | |
| | TTTTTCAGATAGATT | | TTTTTCAGATAGATT | | | | |
| | GTCAA | | GTCAG | | | | |
| rs15102 | TAAACAATGTACATG | 910 | TAAACAATGTACATG | 1940 | 7 | 117504336 | − |
| 0603 | AACATACCTTTCCAA | | AACATACCTTTCCAA | | | | |
| | TTTTTCAGATAGATT | | TTTTTCAGATAGATT | | | | |
| | GTCAA | | GTCAG | | | | |
| rs39750 | GGCATTAATGAGTTT | 911 | | | 7 | 117509035 | − |
| 8256 | AGGATTTTTCTTTGA | | | | | | |
| | AGCCAGCTCTCTATC | | | | | | |
| | CCATT | | | | | | |
| rs39750 | GGCATTAATGAGTTT | 912 | | | 7 | 117509035 | − |
| 8256 | AGGATTTTTCTTTGA | | | | | | |
| | AGCCAGCTCTCTATC | | | | | | |
| | CCATT | | | | | | |
| rs39750 | GGCATTAATGAGTTT | 913 | | | 7 | 117509035 | − |
| 8256 | AGGATTTTTCTTTGA | | | | | | |
| | AGCCAGCTCTCTATC | | | | | | |
| | CCATT | | | | | | |
| rs36850 | TTTATTCTTTTGCAG | 914 | | | 7 | 117509069 | + |
| 5753 | AGAATGGGATAGAGA | | | | | | |
| | GCTGGCTTCAAAGAA | | | | | | |
| | AAATC | | | | | | |
| rs36850 | TTTATTCTTTTGCAG | 915 | | | 7 | 117509069 | + |
| 5753 | AGAATGGGATAGAGA | | | | | | |
| | GCTGGCTTCAAAGAA | | | | | | |
| | AAATC | | | | | | |
| rs36850 | TTTATTCTTTTGCAG | 916 | | | 7 | 117509069 | + |
| 5753 | AGAATGGGATAGAGA | | | | | | |
| | GCTGGCTTCAAAGAA | | | | | | |
| | AAATC | | | | | | |
| rs11554 | GGGATAGAGAGCTGG | 917 | | | 7 | 117509089 | + |
| 5701 | CTTCAAAGAAAAATC | | | | | | |
| | YTAAACTCATTAATG | | | | | | |
| | CCCTT | | | | | | |
| rs11554 | GGGATAGAGAGCTGG | 918 | | | 7 | 117509089 | + |
| 5701 | CTTCAAAGAAAAATC | | | | | | |
| | YTAAACTCATTAATG | | | | | | |
| | CCCTT | | | | | | |
| rs11554 | GGGATAGAGAGCTGG | 919 | | | 7 | 117509089 | + |
| 5701 | CTTCAAAGAAAAATC | | | | | | |
| | CTAAACTCATTAATG | | | | | | |
| | CCCTT | | | | | | |
| rs75961 | ACATAATGAATGTAC | 920 | ACATAATGAATGTAC | 1941 | 7 | 117509123 | − |
| 395 | AAATGAGATCCTTAC | | AAATGAGATCCTTAC | | | | |
| | CCCTAAATATAAAAA | | CCCTAAATATAAAAA | | | | |
| | GATTT | | GATTC | | | | |
| rs75961 | ACATAATGAATGTAC | 921 | ACATAATGAATGTAC | 1942 | 7 | 117509123 | − |
| 395 | AAATGAGATCCTTAC | | AAATGAGATCCTTAC | | | | |
| | CCCTAAATATAAAAA | | CCCTAAATATAAAAA | | | | |
| | GATTT | | GATTC | | | | |
| rs75961 | ACATAATGAATGTAC | 922 | ACATAATGAATGTAC | 1943 | 7 | 117509123 | − |
| 395 | AAATGAGATCCTTAC | | AAATGAGATCCTTAC | | | | |
| | CCCTAAATATAAAAA | | CCCTAAATATAAAAA | | | | |
| | GATTT | | GATTC | | | | |
| rs12190 | GAAGCTATGATTCTT | 923 | GAAGCTATGATTCTT | 1944 | 7 | 117530899 | − |
| 8751 | CCCAGTAAGAGAGGC | | CCCAGTAAGAGAGGC | | | | |
| | TGTACTGCTTTGGTG | | TGTACTGCTTTGGTG | | | | |
| | ACTTA | | ACTTC | | | | |
| rs12190 | GAAGCTATGATTCTT | 924 | GAAGCTATGATTCTT | 1945 | 7 | 117530899 | − |
| 8751 | CCCAGTAAGAGAGGC | | CCCAGTAAGAGAGGC | | | | |
| | TGTACTGCTTTGGTG | | TGTACTGCTTTGGTG | | | | |
| | ACTTA | | ACTTC | | | | |
| rs12190 | GAAGCTATGATTCTT | 925 | GAAGCTATGATTCTT | 1946 | 7 | 117530899 | − |
| 8751 | CCCAGTAAGAGAGGC | | CCCAGTAAGAGAGGC | | | | |
| | TGTACTGCTTTGGTG | | TGTACTGCTTTGGTG | | | | |
| | ACTTA | | ACTTC | | | | |
| rs11399 | CACCAAAGCAGTACA | 926 | CACCAAAGCAGTACA | 1947 | 7 | 117530953 | + |
| 3958 | GCCTCTCTTACTGGG | | GCCTCTCTTACTGGG | | | | |
| | AAGAATCATAGCTTC | | AAGAATCATAGCTTC | | | | |
| | CTATC | | CTATG | | | | |
| rs11399 | CACCAAAGCAGTACA | 927 | CACCAAAGCAGTACA | 1948 | 7 | 117530953 | + |
| 3958 | GCCTCTCTTACTGGG | | GCCTCTCTTACTGGG | | | | |
| | AAGAATCATAGCTTC | | AAGAATCATAGCTTC | | | | |
| | CTATC | | CTATG | | | | |
| rs11399 | CACCAAAGCAGTACA | 928 | CACCAAAGCAGTACA | 1949 | 7 | 117530953 | + |
| 3958 | GCCTCTCTTACTGGG | | GCCTCTCTTACTGGG | | | | |
| | AAGAATCATAGCTTC | | AAGAATCATAGCTTC | | | | |
| | CTATC | | CTATG | | | | |
| rs39750 | ACCAAAGCAGTACAG | 929 | | | 7 | 117530955 | − |
| 8537 | CCTCTCTTACTGGGA | | | | | | |
| | AGAATCATAGCTTCC | | | | | | |
| | TATGA | | | | | | |
| rs39750 | ACCAAAGCAGTACAG | 930 | | | 7 | 117530955 | + |
| 8537 | CCTCTCTTACTGGGA | | | | | | |
| | AGAATCATAGCTTCC | | | | | | |
| | TATGA | | | | | | |
| rs39750 | ACCAAAGCAGTACAG | 931 | | | 7 | 117530955 | + |
| 8537 | CCTCTCTTACTGGGA | | | | | | |
| | AGAATCATAGCTTCC | | | | | | |
| | TATGA | | | | | | |
| rs77834 | CACAATAAAGAGAAG | 932 | | | 7 | 117530974 | − |
| 169 | GCATAAGCCTATGCC | | | | | | |
| | TAGATAAATCGCGAT | | | | | | |
| | AGAGC | | | | | | |
| rs77834 | CTTACTGGGAAGAAT | 933 | CTTACTGGGAAGAAT | 1950 | 7 | 117530974 | + |
| 169 | CATAGCTTCCTATGA | | CATAGCTTCCTATGA | | | | |
| | CCCGGATAACAAGGA | | CCCGGATAACAAGGA | | | | |
| | GGAAT | | GGAAC | | | | |
| rs77834 | TCTTACTGGGAAGAA | 934 | | | 7 | 117530974 | + |
| 169 | TCATAGCTTCCTATG | | | | | | |
| | ACCCGGATAACAAGG | | | | | | |
| | AGGAA | | | | | | |
| rs78655 | TTACTGGGAAGAATC | 935 | TTACTGGGAAGAATC | 1951 | 7 | 117530975 | + |
| 421 | ATAGCTTCCTATGAC | | ATAGCTTCCTATGAC | | | | |
| | CCGGATAACAAGGAG | | CCGGATAACAAGGAG | | | | |
| | GAACA | | GAACG | | | | |
| rs78655 | TTACTGGGAAGAATC | 936 | TTACTGGGAAGAATC | 1952 | 7 | 117530975 | + |
| 421 | ATAGCTTCCTATGAC | | ATAGCTTCCTATGAC | | | | |
| | CCGGATAACAAGGAG | | CCGGATAACAAGGAG | | | | |
| | GAACA | | GAACG | | | | |
| rs78655 | TCACAATAAAGAGAA | 937 | | | 7 | 117530975 | − |
| 421 | GGCATAAGCCTATGC | | | | | | |
| | CTAGATAAATCGCGA | | | | | | |
| | TAGAG | | | | | | |
| rs80282 | TACTTCATCAAATTT | 938 | | | 7 | 117534318 | − |
| 562 | GTTCAGGTTGTTGGA | | | | | | |
| | AAGGAGACTAACAAG | | | | | | |
| | TTGTC | | | | | | |
| rs80282 | TACTTCATCAAATTT | 939 | | | 7 | 117534318 | − |
| 562 | GTTCAGGTTGTTGGA | | | | | | |
| | AAGGAGACTAACAAG | | | | | | |
| | TTGTC | | | | | | |
| rs39750 | GTATTGGACAACTTG | 940 | | | 7 | 117534363 | + |
| 8759 | TTAGTCTCCTTTCCA | | | | | | |
| | ACAACCTGAACAAAT | | | | | | |
| | TTGAT | | | | | | |
| rs39750 | TATTGGACAACTTGT | 941 | TATTGGACAACTTGT | 1953 | 7 | 117534363 | + |
| 8759 | TAGTCTCCTTTCCAA | | TAGTCTCCTTTCCAA | | | | |
| | CAACCTGAACAAATT | | CAACCTGAACAAATT | | | | |
| | TGATA | | TGATG | | | | |
| rs39750 | GTATTGGACAACTTG | 942 | | | 7 | 117534363 | + |
| 8759 | TTAGTCTCCTTTCCA | | | | | | |
| | ACAACCTGAACAAAT | | | | | | |
| | TTGAT | | | | | | |
| rs77188 | TTGGACAACTTGTTA | 943 | | | 7 | 117534366 | + |
| 391 | GTCTCCTTTCCAACA | | | | | | |
| | ACCTGAACAAATTTG | | | | | | |
| | ATGAA | | | | | | |
| rs77188 | TTGGACAACTTGTTA | 944 | | | 7 | 117534366 | + |
| 391 | GTCTCCTTTCCAACA | | | | | | |
| | ACCTGAACAAATTTG | | | | | | |
| | ATGAA | | | | | | |
| rs77188 | TTGGACAACTTGTTA | 945 | | | 7 | 117534366 | + |
| 391 | GTCTCCTTTCCAACA | | | | | | |
| | ACCTGAACAAATTTG | | | | | | |
| | ATGAA | | | | | | |
| rs12190 | TTTTATTTTCCAGGG | 946 | | | 7 | 117535285 | + |
| 8752 | ACTTGCATTGGCACA | | | | | | |
| | TTTCGTGTGGATCGC | | | | | | |
| | TCCTT | | | | | | |
| rs12190 | TTTTATTTTCCAGGG | 947 | | | 7 | 117535285 | + |
| 8752 | ACTTGCATTGGCACA | | | | | | |
| | TTTCGTGTGGATCGC | | | | | | |
| | TCCTT | | | | | | |
| rs12190 | TTTTATTTTCCAGGG | 948 | | | 7 | 117535285 | + |
| 8752 | ACTTGCATTGGCACA | | | | | | |
| | TTTCGTGTGGATCGC | | | | | | |
| | TCCTT | | | | | | |
| rs12190 | TGGTGTTTTTATCTG | 949 | | | 7 | 117540230 | + |
| 9011 | TGCTTCCCTATGCAC | | | | | | |
| | TAATCAAAGGAATCA | | | | | | |
| | TCCTC | | | | | | |
| rs12190 | TGGTGTTTTTATCTG | 950 | | | 7 | 117540230 | + |
| 9011 | TGCTTCCCTATGCAC | | | | | | |
| | TAATCAAAGGAATCA | | | | | | |
| | TCCTC | | | | | | |
| rs12190 | TGGTGTTTTTATCTG | 951 | | | 7 | 117540230 | + |
| 9011 | TGCTTCCCTATGCAC | | | | | | |
| | TAATCAAAGGAATCA | | | | | | |
| | TCCTC | | | | | | |
| rs39750 | TTATCTGTGCTTCCC | 952 | TTATCTGTGCTTCCC | 1954 | 7 | 117540237 | + |
| 8139 | TATGCACTAATCAAA | | TATGCACTAATCAAA | | | | |
| | GGAATCATCCTCYGG | | GGAATCATCCTCYGG | | | | |
| | AAAAT | | AAAAC | | | | |
| rs39750 | TTATCTGTGCTTCCC | 953 | TTATCTGTGCTTCCC | 1955 | 7 | 117540237 | + |
| 8139 | TATGCACTAATCAAA | | TATGCACTAATCAAA | | | | |
| | GGAATCATCCTCYGG | | GGAATCATCCTCYGG | | | | |
| | AAAAT | | AAAAC | | | | |
| rs39750 | TTATCTGTGCTTCCC | 954 | TTATCTGTGCTTCCC | 1956 | 7 | 117540237 | + |
| 8139 | TATGCACTAATCAAA | | TATGCACTAATCAAA | | | | |
| | GGAATCATCCTCCGG | | GGAATCATCCTCCGG | | | | |
| | AAAAT | | AAAAC | | | | |
| rs77409 | TGTGCTTCCCTATGC | 955 | | | 7 | 117540243 | + |
| 459 | ACTAATCAAAGGAAT | | | | | | |
| | CATCCTCCGGAAAAT | | | | | | |
| | ATTCA | | | | | | |
| rs77409 | GAAATTGCCGAGTGA | 956 | | | 7 | 117540243 | − |
| 459 | CCGCCATGCGCAGAA | | | | | | |
| | CAATGCAGAATGRGA | | | | | | |
| | TGGTG | | | | | | |
| rs77409 | TGTGCTTCCCTATGC | 957 | | | 7 | 117540243 | + |
| 459 | ACTAATCAAAGGAAT | | | | | | |
| | CATCCTCCGGAAAAT | | | | | | |
| | ATTCA | | | | | | |
| rs39750 | CTATGCACTAATCAA | 958 | CTATGCACTAATCAA | 1957 | 7 | 117540251 | + |
| 8144 | AGGAATCATCCTCYG | | AGGAATCATCCTCYG | | | | |
| | GAAAAHATTCAYCAC | | GAAAAHATTCAYCAC | | | | |
| | CATCT | | CATCC | | | | |
| rs39750 | AGCCCAGGGAAATTG | 959 | | | 7 | 117540251 | − |
| 8144 | CCGAGTGACCGCCAT | | | | | | |
| | GYGCAGAACAATGCA | | | | | | |
| | GAATG | | | | | | |
| rs39750 | GCCCAGGGAAATTGC | 960 | GCCCAGGGAAATTGC | 1958 | 7 | 117540251 | − |
| 8144 | CGAGTGACCGCCATG | | CGAGTGACCGCCATG | | | | |
| | YGCAGAACAATGCAG | | YGCAGAACAATGCAG | | | | |
| | AATGA | | AATGG | | | | |
| rs77932 | GTCATACCATGTTTG | 961 | GTCATACCATGTTTG | 1959 | 7 | 117540270 | − |
| 196 | TACAGCCCAGGGAAA | | TACAGCCCAGGGAAA | | | | |
| | TTGCCGAGTGACCGC | | TTGCCGAGTGACCGC | | | | |
| | CATGC | | CATGG | | | | |
| rs77932 | GTCATACCATGTTTG | 962 | GTCATACCATGTTTG | 1960 | 7 | 117540270 | − |
| 196 | TACAGCCCAGGGAAA | | TACAGCCCAGGGAAA | | | | |
| | TTGCYGAGTGACCGC | | TTGCYGAGTGACCGC | | | | |
| | CATGT | | CATGC | | | | |
| rs77932 | GTCATACCATGTTTG | 963 | GTCATACCATGTTTG | 1961 | 7 | 117540270 | − |
| 196 | TACAGCCCAGGGAAA | | TACAGCCCAGGGAAA | | | | |
| | TTGCYGAGTGACCGC | | TTGCYGAGTGACCGC | | | | |
| | CATGT | | CATGC | | | | |
| rs12190 | TTATTGCTCCAAGAG | 964 | | | 7 | 117540285 | − |
| 8753 | AGTCATACCATGTTT | | | | | | |
| | GTACAGCCCAGGGAA | | | | | | |
| | ATTGC | | | | | | |
| rs12190 | TTATTGCTCCAAGAG | 965 | | | 7 | 117540285 | − |
| 8753 | AGTCATACCATGTTT | | | | | | |
| | GTACAGCCCAGGGAA | | | | | | |
| | ATTGC | | | | | | |
| rs12190 | TTATTGCTCCAAGAG | 966 | | | 7 | 117540285 | − |
| 8753 | AGTCATACCATGTTT | | | | | | |
| | GTACAGCCCAGGGAA | | | | | | |
| | ATTGC | | | | | | |
| rs74551 | AGTGAAGAACAAAAG | 967 | AGTGAAGAACAAAAG | 1962 | 7 | 117548795 | − |
| 128 | AACTACCTTGCCTGC | | AACTACCTTGCCTGC | | | | |
| | TCCAGTGGATCCAGC | | TCCAGTGGATCCAGC | | | | |
| | AACCT | | AACCG | | | | |
| rs74551 | AGTGAAGAACAAAAG | 968 | AGTGAAGAACAAAAG | 1963 | 7 | 117548795 | − |
| 128 | AACTACCTTGCCTGC | | AACTACCTTGCCTGC | | | | |
| | TCCAGTGGATCCAGC | | TCCAGTGGATCCAGC | | | | |
| | AACCT | | AACCG | | | | |
| rs74551 | AGTGAAGAACAAAAG | 969 | AGTGAAGAACAAAAG | 1964 | 7 | 117548795 | − |
| 128 | AACTACCTTGCCTGC | | AACTACCTTGCCTGC | | | | |
| | TCCAGTGGATCCAGC | | TCCAGTGGATCCAGC | | | | |
| | AACCT | | AACCG | | | | |
| rs13957 | CGTGATTTGATAATG | 970 | | | 7 | 117559471 | + |
| 3311 | ACCTAATAATGATGG | | | | | | |
| | GTTTTATTTCCAGAC | | | | | | |
| | TTCAC | | | | | | |
| rs13957 | GCTTAATTTTACCCT | 971 | | | 7 | 117559471 | − |
| 3311 | CTGAAGGCTCCAGTT | | | | | | |
| | CTCCCATAATCACCA | | | | | | |
| | TTAGA | | | | | | |
| rs13957 | GCTTAATTTTACCCT | 972 | | | 7 | 117559471 | − |
| 3311 | CTGAAGGCTCCAGTT | | | | | | |
| | CTCCCATAATCACCA | | | | | | |
| | TTAGA | | | | | | |
| rs12190 | GGAGCCTTCAGAGGG | 973 | | | 7 | 117559546 | + |
| 9017 | TAAAATTAAGCACAG | | | | | | |
| | TGGAAGAATTTCATT | | | | | | |
| | CTGTT | | | | | | |
| rs12190 | GGAGCCTTCAGAGGG | 974 | | | 7 | 117559546 | + |
| 9017 | TAAAATTAAGCACAG | | | | | | |
| | TGGAAGAATTTCATT | | | | | | |
| | CTGTT | | | | | | |
| rs12190 | GGAGCCTTCAGAGGG | 975 | | | 7 | 117559546 | + |
| 9017 | TAAAATTAAGCACAG | | | | | | |
| | TGGAAGAATTTCATT | | | | | | |
| | CTGTT | | | | | | |
| rs11399 | TGTTCTCAGTTTTCC | 976 | | | 7 | 117559591 | + |
| 3960 | TGGATTATGCCTGGC | | | | | | |
| | ACCATTAAAGAAAAT | | | | | | |
| | ATCAT | | | | | | |
| rs11399 | TGTTCTCAGTTTTCC | 977 | | | 7 | 117559591 | + |
| 3960 | TGGATTATGCCTGGC | | | | | | |
| | ACCATTAAAGAAAAT | | | | | | |
| | ATCAT | | | | | | |
| rs11399 | TGTTCTCAGTTTTCC | 978 | | | 7 | 117559591 | + |
| 3960 | TGGATTATGCCTGGC | | | | | | |
| | ACCATTAAAGAAAAT | | | | | | |
| | ATCAT | | | | | | |
| rs77646 | AGAAAATATCATCTT | 979 | AGAAAATATCATCTT | 1965 | 7 | 117559629 | + |
| 904 | TGGTGTTTCCTATGA | | TGGTGTTTCCTATGA | | | | |
| | TGAATATAGATACAG | | TGAATATAGATACAG | | | | |
| | AAGCA | | AAGCG | | | | |
| rs77646 | AGAAAATATCATCTT | 980 | AGAAAATATCATCTT | 1966 | 7 | 117559629 | + |
| 904 | TGGTGTTTCCTATGA | | TGGTGTTTCCTATGA | | | | |
| | TGAATATAGATACAG | | TGAATATAGATACAG | | | | |
| | AAGCA | | AAGCG | | | | |
| rs77646 | AGAAAATATCATCTT | 981 | AGAAAATATCATCTT | 1967 | 7 | 117559629 | + |
| 904 | TGGTGTTTCCTATGA | | TGGTGTTTCCTATGA | | | | |
| | TGAATATAGATACAG | | TGAATATAGATACAG | | | | |
| | AAGCA | | AAGCG | | | | |
| rs11399 | TTTGGTAATAGGACA | 982 | | | 7 | 117587778 | + |
| 3959 | TCTCCAAGTTTGCAG | | | | | | |
| | AGAAAGACAATATAG | | | | | | |
| | TTCTT | | | | | | |
| rs11399 | TTGGTAATAGGACAT | 983 | TTGGTAATAGGACAT | 1968 | 7 | 117587778 | + |
| 3959 | CTCCAAGTTTGCAGA | | CTCCAAGTTTGCAGA | | | | |
| | GAAAGACAATATAGT | | GAAAGACAATATAGT | | | | |
| | TCTTT | | TCTTG | | | | |
| rs12190 | AGTTTGCAGAGAAAG | 984 | | | 7 | 117587799 | + |
| 8757 | ACAATATAGTTCTTG | | | | | | |
| | GAGAAGGTGGAATCA | | | | | | |
| | CACTG | | | | | | |
| rs12190 | AGTTTGCAGAGAAAG | 985 | | | 7 | 117587799 | + |
| 8757 | ACAATATAGTTCTTG | | | | | | |
| | GAGAAGGTGGAATCA | | | | | | |
| | CACTG | | | | | | |
| rs12190 | AGTTTGCAGAGAAAG | 986 | | | 7 | 117587799 | + |
| 8757 | ACAATATAGTTCTTG | | | | | | |
| | GAGAAGGTGGAATCA | | | | | | |
| | CACTG | | | | | | |
| rs12190 | GTTTGCAGAGAAAGA | 987 | | | 7 | 117587800 | + |
| 8755 | CAATATAGTTCTTGG | | | | | | |
| | AGAAGGTGGAATCAC | | | | | | |
| | ACTGA | | | | | | |
| rs12190 | TTTGCAGAGAAAGAC | 988 | TTTGCAGAGAAAGAC | 1969 | 7 | 117587800 | + |
| 8755 | AATATAGTTCTTGGA | | AATATAGTTCTTGGA | | | | |
| | GAAGGTGGAATCACA | | GAAGGTGGAATCACA | | | | |
| | CTGAA | | CTGAG | | | | |
| rs12190 | GTTTGCAGAGAAAGA | 989 | | | 7 | 117587800 | + |
| 8755 | CAATATAGTTCTTGG | | | | | | |
| | AGAAGGTGGAATCAC | | | | | | |
| | ACTGA | | | | | | |
| rs12190 | TTGCAGAGAAAGACA | 990 | TTGCAGAGAAAGACA | 1970 | 7 | 117587801 | + |
| 9005 | ATATAGTTCTTGGAG | | ATATAGTTCTTGGAG | | | | |
| | AAGGTGGAATCACAC | | AAGGTGGAATCACAC | | | | |
| | TGAGT | | TGAGG | | | | |
| rs12190 | TTGCAGAGAAAGACA | 991 | TTGCAGAGAAAGACA | 1971 | 7 | 117587801 | + |
| 9005 | ATATAGTTCTTGGAG | | ATATAGTTCTTGGAG | | | | |
| | AAGGTGGAATCACAC | | AAGGTGGAATCACAC | | | | |
| | TGAGT | | TGAGG | | | | |
| rs12190 | TTGCAGAGAAAGACA | 992 | TTGCAGAGAAAGACA | 1972 | 7 | 117587801 | + |
| 9005 | ATATAGTTCTTGGAG | | ATATAGTTCTTGGAG | | | | |
| | AAGGTGGAATCACAC | | AAGGTGGAATCACAC | | | | |
| | TGAGT | | TGAGG | | | | |
| rs12190 | CAGAGAAAGACAATA | 993 | | | 7 | 117587805 | + |
| 9013 | TAGTTCTTGGAGAAG | | | | | | |
| | GTGGAATCACACTGA | | | | | | |
| | GTGGA | | | | | | |
| rs75527 | TAGACCAATAATTAG | 994 | | | 7 | 117587806 | − |
| 207 | TTATTCACCTTGCTA | | | | | | |
| | AAGAAATTCTTGCTC | | | | | | |
| | GTTGA | | | | | | |
| rs75527 | TAGACCAATAATTAG | 995 | | | 7 | 117587806 | − |
| 207 | TTATTCACCTTGCTA | | | | | | |
| | AAGAAATTCTTGCTC | | | | | | |
| | GTTGA | | | | | | |
| rs75527 | TAGACCAATAATTAG | 996 | | | 7 | 117587806 | − |
| 207 | TTATTCACCTTGCTA | | | | | | |
| | AAGAAATTCTTGCTC | | | | | | |
| | GTTGA | | | | | | |
| rs74597 | AGACAATATAGTTCT | 997 | AGACAATATAGTTCT | 1973 | 7 | 117587811 | + |
| 325 | TGGAGAAGGTGGAAT | | TGGAGAAGGTGGAAT | | | | |
| | CACACTGAGTGGAGG | | CACACTGAGTGGAGG | | | | |
| | TCAAT | | TCAAC | | | | |
| rs74597 | AGACAATATAGTTCT | 998 | AGACAATATAGTTCT | 1974 | 7 | 117587811 | + |
| 325 | TGGAGAAGGTGGAAT | | TGGAGAAGGTGGAAT | | | | |
| | CACACTGAGTGGAGG | | CACACTGAGTGGAGG | | | | |
| | TCAAT | | TCAAC | | | | |
| rs74597 | AAGACAATATAGTTC | 999 | | | 7 | 117587811 | + |
| 325 | TTGGAGAAGGTGGAA | | | | | | |
| | TCACACTGAGTGGAG | | | | | | |
| | GTCAA | | | | | | |
| rs75549 | AGAAGGTGGAATCAC | 1000 | AGAAGGTGGAATCAC | 1975 | 7 | 117587829 | + |
| 581 | ACTGAGTGGAGGTCA | | ACTGAGTGGAGGTCA | | | | |
| | ACGAGCAAGAATTTC | | ACGAGCAAGAATTTC | | | | |
| | TTTAA | | TTTAG | | | | |
| rs75549 | AGAAGGTGGAATCAC | 1001 | AGAAGGTGGAATCAC | 1976 | 7 | 117587829 | + |
| 581 | ACTGAGTGGAGGTCA | | ACTGAGTGGAGGTCA | | | | |
| | ACGAGCAAGAATTTC | | ACGAGCAAGAATTTC | | | | |
| | TTTAA | | TTTAG | | | | |
| rs75549 | TGACATTTACAGCAA | 1002 | | | 7 | 117587829 | − |
| 581 | ATGCTTGCTAGACCA | | | | | | |
| | ATAATTAGTTATTCA | | | | | | |
| | CCTTG | | | | | | |
| rs80055 | GAATGACATTTACAG | 1003 | GAATGACATTTACAG | 1977 | 7 | 117587833 | − |
| 610 | CAAATGCTTGCTAGA | | CAAATGCTTGCTAGA | | | | |
| | CCAATAATTAGTTAT | | CCAATAATTAGTTAT | | | | |
| | TCACG | | TCACC | | | | |
| rs80055 | GGTGGAATCACACTG | 1004 | GGTGGAATCACACTG | 1978 | 7 | 117587833 | + |
| 610 | AGTGGAGGTCAACGA | | AGTGGAGGTCAACGA | | | | |
| | GCAAGAATTTCTTTA | | GCAAGAATTTCTTTA | | | | |
| | GCAAC | | GCAAG | | | | |
| rs80055 | GGTGGAATCACACTG | 1005 | GGTGGAATCACACTG | 1979 | 7 | 117587833 | + |
| 610 | AGTGGAGGTCAACGA | | AGTGGAGGTCAACGA | | | | |
| | GCAAGAATTTCTTTA | | GCAAGAATTTCTTTA | | | | |
| | GCAAA | | GCAAG | | | | |
| rs39750 | TATCCAAAAGGAGAG | 1006 | | | 7 | 117590353 | − |
| 8267 | TCTAATAAATACAAA | | | | | | |
| | TCAGCATCTTTGTAT | | | | | | |
| | ACTKC | | | | | | |
| rs39750 | TATCCAAAAGGAGAG | 1007 | | | 7 | 117590353 | − |
| 8267 | TCTAATAAATACAAA | | | | | | |
| | TCAGCATCTTTGTAT | | | | | | |
| | ACTGC | | | | | | |
| rs39750 | TATCCAAAAGGAGAG | 1008 | | | 7 | 117590353 | − |
| 8267 | TCTAATAAATACAAA | | | | | | |
| | TCAGCATCTTTGTAT | | | | | | |
| | ACTGC | | | | | | |
| rs12190 | GGTATCCAAAAGGAG | 1009 | | | 7 | 117590355 | − |
| 9047 | AGTCTAATAAATACA | | | | | | |
| | AATCAGCATCTTTGT | | | | | | |
| | ATACT | | | | | | |
| rs12190 | GGTATCCAAAAGGAG | 1010 | | | 7 | 117590355 | − |
| 9047 | AGTCTAATAAATACA | | | | | | |
| | AATCAGCATCTTTGT | | | | | | |
| | ATACT | | | | | | |
| rs12190 | GGTATCCAAAAGGAG | 1011 | | | 7 | 117590355 | − |
| 9047 | AGTCTAATAAATACA | | | | | | |
| | AATCAGCATCTTTGT | | | | | | |
| | ATACT | | | | | | |
| rs39750 | TCTTTTTCTGTTAAA | 1012 | TCTTTTTCTGTTAAA | 1980 | 7 | 117590378 | − |
| 8276 | ACATCTAGGTATCCA | | ACATCTAGGTATCCA | | | | |
| | AAAGGAGAGTCTAAT | | AAAGGAGAGTCTAAT | | | | |
| | AAATA | | AAATC | | | | |
| rs39750 | TCTTTTTCTGTTAAA | 1013 | TCTTTTTCTGTTAAA | 1981 | 7 | 117590378 | − |
| 8276 | ACATCTAGGTATCCA | | ACATCTAGGTATCCA | | | | |
| | AAAGGAGAGTCTAAT | | AAAGGAGAGTCTAAT | | | | |
| | AAATA | | AAATC | | | | |
| rs39750 | TTCTTTTTCTGTTAA | 1014 | | | 7 | 117590378 | − |
| 8276 | AACATCTAGGTATCC | | | | | | |
| | AAAAGGAGAGTCTAA | | | | | | |
| | TAAAT | | | | | | |
| rs39750 | TACAAAGATGCTGAT | 1015 | TACAAAGATGCTGAT | 1982 | 7 | 117590409 | + |
| 8288 | TTGTATTTATTAGAC | | TTGTATTTATTAGAC | | | | |
| | TCTCCTTTTGGATAC | | TCTCCTTTTGGATAC | | | | |
| | CTAGA | | CTAGG | | | | |
| rs39750 | TACAAAGATGCTGAT | 1016 | TACAAAGATGCTGAT | 1983 | 7 | 117590409 | + |
| 8288 | TTGTATTTATTAGAC | | TTGTATTTATTAGAC | | | | |
| | TCTCCTTTTGGATAC | | TCTCCTTTTGGATAC | | | | |
| | CTAGA | | CTAGG | | | | |
| rs39750 | TACAAAGATGCTGAT | 1017 | TACAAAGATGCTGAT | 1984 | 7 | 117590409 | + |
| 8288 | TTGTATTTATTAGAC | | TTGTATTTATTAGAC | | | | |
| | TCTCCTTTTGGATAC | | TCTCCTTTTGGATAC | | | | |
| | CTAGA | | CTAGG | | | | |
| rs18001 | ACCAATTTAGTGCAG | 1018 | | | 7 | 117592169 | + |
| 00 | AAAGAAGAAATTCAA | | | | | | |
| | TCCTAACTGAGACCT | | | | | | |
| | TACAC | | | | | | |
| rs18001 | ACCAATTTAGTGCAG | 1019 | | | 7 | 117592169 | + |
| 00 | AAAGAAGAAATTCAA | | | | | | |
| | TCCTAACTGAGACCT | | | | | | |
| | TACAC | | | | | | |
| rs18001 | ACCAATTTAGTGCAG | 1020 | | | 7 | 117592169 | + |
| 00 | AAAGAAGAAATTCAA | | | | | | |
| | TCCTAACTGAGACCT | | | | | | |
| | TACAC | | | | | | |
| rs39750 | GTTCCATGTAGTCAC | 1021 | | | 7 | 117594930 | − |
| 8387 | TGCTGGTATGCTCTC | | | | | | |
| | CATATCATCAAAAAA | | | | | | |
| | GCACT | | | | | | |
| rs39750 | GCATGAAACTGTACT | 1022 | GCATGAAACTGTACT | 1985 | 7 | 117594930 | + |
| 8387 | GTCTTATTGTAATAG | | GTCTTATTGTAATAG | | | | |
| | CCATAATTCTTTTAT | | CCATAATTCTTTTAT | | | | |
| | TCAGT | | TCAGG | | | | |
| rs39750 | TTCCATGTAGTCACT | 1023 | TTCCATGTAGTCACT | 1986 | 7 | 117594930 | − |
| 8387 | GCTGGTATGCTCTCC | | GCTGGTATGCTCTCC | | | | |
| | ATATCATCAAAAAAG | | ATATCATCAAAAAAG | | | | |
| | CACTA | | CACTC | | | | |
| rs80224 | ATTTAATCAACAGAA | 1024 | ATTTAATCAACAGAA | 1987 | 7 | 117602868 | − |
| 560 | ATAAAACACAATCTA | | ATAAAACACAATCTA | | | | |
| | CACAATAGGACATGG | | CACAATAGGACATGG | | | | |
| | AATAT | | AATAC | | | | |
| rs80224 | ATTTAATCAACAGAA | 1025 | ATTTAATCAACAGAA | 1988 | 7 | 117602868 | − |
| 560 | ATAAAACACAATCTA | | ATAAAACACAATCTA | | | | |
| | CACAATAGGACATGG | | CACAATAGGACATGG | | | | |
| | AATAT | | AATAC | | | | |
| rs80224 | TATTTAATCAACAGA | 1026 | | | 7 | 117602868 | − |
| 560 | AATAAAACACAATCT | | | | | | |
| | ACACAATAGGACATG | | | | | | |
| | GAATA | | | | | | |
| rs39750 | TGTGATTAGAGTATG | 1027 | TGTGATTAGAGTATG | 1989 | 7 | 117603654 | − |
| 8435 | CACCAGTGGTAGACC | | CACCAGTGGTAGACC | | | | |
| | TCTGAAGAATCCCAT | | TCTGAAGAATCCCAT | | | | |
| | AGCAA | | AGCAT | | | | |
| rs39750 | TGTGATTAGAGTATG | 1028 | TGTGATTAGAGTATG | 1990 | 7 | 117603654 | − |
| 8435 | CACCAGTGGTAGACC | | CACCAGTGGTAGACC | | | | |
| | TCTGAAGAATCCCAT | | TCTGAAGAATCCCAT | | | | |
| | AGCAA | | AGCAG | | | | |
| rs39750 | CAGTTCGTATTATGT | 1029 | | | 7 | 117603654 | + |
| 8435 | GTTTTACATTTACGT | | | | | | |
| | GGGAGTAGCCGACAC | | | | | | |
| | TTTGC | | | | | | |
| rs39750 | TATGGGATTCTTCAG | 1030 | | | 7 | 117603708 | + |
| 8442 | AGGTCTACCACTGGT | | | | | | |
| | GCATACTCTAATCAC | | | | | | |
| | AGTGT | | | | | | |
| rs39750 | TATGGGATTCTTCAG | 1031 | | | 7 | 117603708 | + |
| 8442 | AGGTCTACCACTGGT | | | | | | |
| | GCATACTCTAATCAC | | | | | | |
| | AGTGT | | | | | | |
| rs39750 | TATGGGATTCTTCAG | 1032 | | | 7 | 117603708 | + |
| 8442 | AGGTCTACCACTGGT | | | | | | |
| | GCATACTCTAATCAC | | | | | | |
| | AGTGT | | | | | | |
| rs39750 | CCTATTGATGGTGGA | 1033 | CCTATTGATGGTGGA | 1991 | 7 | 117603782 | − |
| 8453 | TCAGCAGTTTCATTT | | TCAGCAGTTTCATTT | | | | |
| | CTTAGACCTAGTAAA | | CTTAGACCTAGTAAA | | | | |
| | GTACG | | GTACC | | | | |
| rs39750 | CCTATTGATGGTGGA | 1034 | CCTATTGATGGTGGA | 1992 | 7 | 117603782 | − |
| 8453 | TCAGCAGTTTCATTT | | TCAGCAGTTTCATTT | | | | |
| | CTTAGACCTAGTAAA | | CTTAGACCTAGTAAA | | | | |
| | GTACG | | GTACC | | | | |
| rs39750 | CCTATTGATGGTGGA | 1035 | CCTATTGATGGTGGA | 1993 | 7 | 117603782 | − |
| 8453 | TCAGCAGTTTCATTT | | TCAGCAGTTTCATTT | | | | |
| | CTTAGACCTAGTAAA | | CTTAGACCTAGTAAA | | | | |
| | GTACG | | GTACC | | | | |
| rs14103 | GTCAAATATGGTAAG | 1036 | GTCAAATATGGTAAG | 1994 | 7 | 117606695 | − |
| 3578 | AGGCAGAAGGTCATC | | AGGCAGAAGGTCATC | | | | |
| | CAAAATTGCTATATC | | CAAAATTGCTATATC | | | | |
| | TTTGA | | TTTGG | | | | |
| rs14103 | GTCAAATATGGTAAG | 1037 | GTCAAATATGGTAAG | 1995 | 7 | 117606695 | − |
| 3578 | AGGCAGAAGGTCATC | | AGGCAGAAGGTCATC | | | | |
| | CAAAATTGCTATATC | | CAAAATTGCTATATC | | | | |
| | TTTGA | | TTTGG | | | | |
| rs14103 | GTCAAATATGGTAAG | 1038 | GTCAAATATGGTAAG | 1996 | 7 | 117606695 | − |
| 3578 | AGGCAGAAGGTCATC | | AGGCAGAAGGTCATC | | | | |
| | CAAAATTGCTATATC | | CAAAATTGCTATATC | | | | |
| | TTTGA | | TTTGG | | | | |
| rs18001 | AGGGTTGTAAAACTG | 1039 | AGGGTTGTAAAACTG | 1997 | 7 | 117610521 | − |
| 11 | CGACAACTGCTATAG | | CGACAACTGCTATAG | | | | |
| | CTCCAATCACAATTA | | CTCCAATCACAATTA | | | | |
| | ATAAC | | ATAAG | | | | |
| rs18001 | AGGGTTGTAAAACTG | 1040 | AGGGTTGTAAAACTG | 1998 | 7 | 117610521 | − |
| 11 | CGACAACTGCTATAG | | CGACAACTGCTATAG | | | | |
| | CTCCAATCACAATTA | | CTCCAATCACAATTA | | | | |
| | ATAAG | | ATAAC | | | | |
| rs18001 | AGGGTTGTAAAACTG | 1041 | AGGGTTGTAAAACTG | 1999 | 7 | 117610521 | − |
| 11 | CGACAACTGCTATAG | | CGACAACTGCTATAG | | | | |
| | CTCCAATCACAATTA | | CTCCAATCACAATTA | | | | |
| | ATAAC | | ATAAG | | | | |
| rs76151 | AGATGAGTGAAAATT | 1042 | | | 7 | 117611555 | − |
| 804 | GGACTCCTGCCTGTG | | | | | | |
| | AAATATTTCCATAGA | | | | | | |
| | AAACA | | | | | | |
| rs76151 | TTCAGGTACAAGATA | 1043 | | | 7 | 117611555 | + |
| 804 | TTATGAAATTACATT | | | | | | |
| | TTGTGTTTATGTTAT | | | | | | |
| | TTGCA | | | | | | |
| rs76151 | AGATGAGTGAAAATT | 1044 | | | 7 | 117611555 | − |
| 804 | GGACTCCTGCCTGTG | | | | | | |
| | AAATATTTCCATAGA | | | | | | |
| | AAACA | | | | | | |
| rs15021 | AAGGCACGAAGTGTC | 1045 | AAGGCACGAAGTGTC | 2000 | 7 | 117611595 | − |
| 2784 | CATAGTCCTTTTAAG | | CATAGTCCTTTTAAG | | | | |
| | CTTGTAACAAGATGA | | CTTGTAACAAGATGA | | | | |
| | GTGAA | | GTGAC | | | | |
| rs15021 | AAGGCACGAAGTGTC | 1046 | AAGGCACGAAGTGTC | 2001 | 7 | 117611595 | − |
| 2784 | CATAGTCCTTTTAAG | | CATAGTCCTTTTAAG | | | | |
| | CTTGTAACAAGATGA | | CTTGTAACAAGATGA | | | | |
| | GTGAA | | GTGAC | | | | |
| rs15021 | GTTATTTGCAATGTT | 1047 | | | 7 | 117611595 | + |
| 2784 | TTCTATGGAAATATT | | | | | | |
| | TCACAGGCAGGAGTC | | | | | | |
| | CAATT | | | | | | |
| rs39750 | CGTCCGAAGGCACGA | 1048 | CGTCCGAAGGCACGA | 2002 | 7 | 117611601 | − |
| 8510 | AGTGTCCATAGTCCT | | AGTGTCCATAGTCCT | | | | |
| | TTTAAGCTTGTAACA | | TTTAAGCTTGTAACA | | | | |
| | AGATA | | AGATG | | | | |
| rs39750 | CGTCCGAAGGCACGA | 1049 | CGTCCGAAGGCACGA | 2003 | 7 | 117611601 | − |
| 8510 | AGTGTCCATAGTCCT | | AGTGTCCATAGTCCT | | | | |
| | TTTAAGCTTGTAACA | | TTTAAGCTTGTAACA | | | | |
| | AGATA | | AGATG | | | | |
| rs39750 | CGTCCGAAGGCACGA | 1050 | CGTCCGAAGGCACGA | 2004 | 7 | 117611601 | − |
| 8510 | AGTGTCCATAGTCCT | | AGTGTCCATAGTCCT | | | | |
| | TTTAAGCTTGTAACA | | TTTAAGCTTGTAACA | | | | |
| | AGATA | | AGATG | | | | |
| rs39750 | ATATTTCACAGGCAG | 1051 | | | 7 | 117611620 | + |
| 8513 | GAGTCCAATTTTCAC | | | | | | |
| | TCATCTTGTTACAAG | | | | | | |
| | CTTAA | | | | | | |
| rs39750 | ATATTTCACAGGCAG | 1052 | | | 7 | 117611620 | + |
| 8513 | GAGTCCAATTTTCAC | | | | | | |
| | TCATCTTGTTACAAG | | | | | | |
| | CTTAA | | | | | | |
| rs39750 | ATATTTCACAGGCAG | 1053 | | | 7 | 117611620 | + |
| 8513 | GAGTCCAATTTTCAC | | | | | | |
| | TCATCTTGTTACAAG | | | | | | |
| | CTTAA | | | | | | |
| rs12190 | AGTCCAATTTTCACT | 1054 | AGTCCAATTTTCACT | 2005 | 7 | 117611635 | + |
| 9036 | CATCTTGTTACAAGC | | CATCTTGTTACAAGC | | | | |
| | TTAAMAGGACTATGG | | TTAAMAGGACTATGG | | | | |
| | ACACT | | ACACC | | | | |
| rs12190 | AGTCCAATTTTCACT | 1055 | AGTCCAATTTTCACT | 2006 | 7 | 117611635 | + |
| 9036 | CATCTTGTTACAAGC | | CATCTTGTTACAAGC | | | | |
| | TTAAMAGGACTATGG | | TTAAMAGGACTATGG | | | | |
| | ACACT | | ACACC | | | | |
| rs12190 | AGTCCAATTTTCACT | 1056 | AGTCCAATTTTCACT | 2007 | 7 | 117611635 | + |
| 9036 | CATCTTGTTACAAGC | | CATCTTGTTACAAGC | | | | |
| | TTAAAAGGACTATGG | | TTAAAAGGACTATGG | | | | |
| | ACACT | | ACACC | | | | |
| rs78194 | TCCAATTTTCACTCA | 1057 | TCCAATTTTCACTCA | 2008 | 7 | 117611637 | + |
| 216 | TCTTGTTACAAGCTT | | TCTTGTTACAAGCTT | | | | |
| | AAAAGGACTATGGAC | | AAAAGGACTATGGAC | | | | |
| | ACTTA | | ACTTC | | | | |
| rs78194 | TCCAATTTTCACTCA | 1058 | TCCAATTTTCACTCA | 2009 | 7 | 117611637 | + |
| 216 | TCTTGTTACAAGCTT | | TCTTGTTACAAGCTT | | | | |
| | AAAAGGACTATGGAC | | AAAAGGACTATGGAC | | | | |
| | ACTTA | | ACTTC | | | | |
| rs78194 | TCCAATTTTCACTCA | 1059 | TCCAATTTTCACTCA | 2010 | 7 | 117611637 | + |
| 216 | TCTTGTTACAAGCTT | | TCTTGTTACAAGCTT | | | | |
| | AAAAGGACTATGGAC | | AAAAGGACTATGGAC | | | | |
| | ACTTA | | ACTTC | | | | |
| rs12190 | CCAATTTTCACTCAT | 1060 | CCAATTTTCACTCAT | 2011 | 7 | 117611638 | + |
| 9019 | CTTGTTACAAGCTTA | | CTTGTTACAAGCTTA | | | | |
| | AAAGGACTATGGACA | | AAAGGACTATGGACA | | | | |
| | CTTCA | | CTTCG | | | | |
| rs12190 | CCAATTTTCACTCAT | 1061 | CCAATTTTCACTCAT | 2012 | 7 | 117611638 | + |
| 9019 | CTTGTTACAAGCTTA | | CTTGTTACAAGCTTA | | | | |
| | AAAGGACTATGGACA | | AAAGGACTATGGACA | | | | |
| | CTTCA | | CTTCG | | | | |
| rs12190 | CCAATTTTCACTCAT | 1062 | CCAATTTTCACTCAT | 2013 | 7 | 117611638 | + |
| 9019 | CTTGTTACAAGCTTA | | CTTGTTACAAGCTTA | | | | |
| | AAAGGACTATGGACA | | AAAGGACTATGGACA | | | | |
| | CTTCA | | CTTCG | | | | |
| rs12190 | AATTTTCACTCATCT | 1063 | AATTTTCACTCATCT | 2014 | 7 | 117611640 | + |
| 9020 | TGTTACAAGCTTAAA | | TGTTACAAGCTTAAA | | | | |
| | AGGACTATGGACACT | | AGGACTATGGACACT | | | | |
| | TCGTA | | TCGTG | | | | |
| rs12190 | AATTTTCACTCATCT | 1064 | AATTTTCACTCATCT | 2015 | 7 | 117611640 | + |
| 9020 | TGTTACAAGCTTAAA | | TGTTACAAGCTTAAA | | | | |
| | AGGACTATGGACACT | | AGGACTATGGACACT | | | | |
| | TCGTA | | TCGTG | | | | |
| rs12190 | ATTCAGAGCTTTGTG | 1065 | | | 7 | 117611640 | − |
| 9020 | GAACAGAGTTTCAAA | | | | | | |
| | GTAAGGCTGCCGTCC | | | | | | |
| | GAAGG | | | | | | |
| rs20032 | TCACTCATCTTGTTA | 1066 | | | 7 | 117611646 | + |
| 1110 | CAAGCTTAAAAGGAC | | | | | | |
| | TATGGACACTTCGTG | | | | | | |
| | CCTTC | | | | | | |
| rs20032 | TCACTCATCTTGTTA | 1067 | | | 7 | 117611646 | + |
| 1110 | CAAGCTTAAAAGGAC | | | | | | |
| | TATGGACACTTCGTG | | | | | | |
| | CCTTC | | | | | | |
| rs20217 | CTCATCTTGTTACAA | 1068 | | | 7 | 117611649 | + |
| 9988 | GCTTAAAAGGACTAT | | | | | | |
| | GGACACTTCGTGCCT | | | | | | |
| | TCGGA | | | | | | |
| rs20217 | CTCATCTTGTTACAA | 1069 | | | 7 | 117611649 | + |
| 9988 | GCTTAAAAGGACTAT | | | | | | |
| | GGACACTTCGTGCCT | | | | | | |
| | TCGGA | | | | | | |
| rs20217 | CTCATCTTGTTACAA | 1070 | | | 7 | 117611649 | + |
| 9988 | GCTTAAAAGGACTAT | | | | | | |
| | GGACACTTCGTGCCT | | | | | | |
| | TCGGA | | | | | | |
| rs78769 | AGTATGTAAATTCAG | 1071 | AGTATGTAAATTCAG | 2016 | 7 | 117611650 | − |
| 542 | AGCTTTGTGGAACRG | | AGCTTTGTGGAACRG | | | | |
| | AGTTTCWAAGTAAGG | | AGTTTCWAAGTAAGG | | | | |
| | CTGCT | | CTGCC | | | | |
| rs78769 | AGTATGTAAATTCAG | 1072 | AGTATGTAAATTCAG | 2017 | 7 | 117611650 | − |
| 542 | AGCTTTGTGGAACRG | | AGCTTTGTGGAACRG | | | | |
| | AGTTTCWAAGTAAGG | | AGTTTCWAAGTAAGG | | | | |
| | CTGCT | | CTGCC | | | | |
| rs78769 | AGTATGTAAATTCAG | 1073 | AGTATGTAAATTCAG | 2018 | 7 | 117611650 | − |
| 542 | AGCTTTGTGGAACRG | | AGCTTTGTGGAACRG | | | | |
| | AGTTTCWAAGTAAGG | | AGTTTCWAAGTAAGG | | | | |
| | CTGCT | | CTGCC | | | | |
| rs18604 | AGAACCAGTTGGCAG | 1074 | AGAACCAGTTGGCAG | 2019 | 7 | 117611663 | − |
| 5772 | TATGTAAATTCAGAG | | TATGTAAATTCAGAG | | | | |
| | CTTTGTGGAACAGAG | | CTTTGTGGAACAGAG | | | | |
| | TTTCA | | TTTCT | | | | |
| rs18604 | AGAACCAGTTGGCAG | 1075 | AGAACCAGTTGGCAG | 2020 | 7 | 117611663 | − |
| 5772 | TATGTAAATTCAGAG | | TATGTAAATTCAGAG | | | | |
| | CTTTGTGGAACAGAG | | CTTTGTGGAACAGAG | | | | |
| | TTTCT | | TTTCA | | | | |
| rs18604 | AGAACCAGTTGGCAG | 1076 | AGAACCAGTTGGCAG | 2021 | 7 | 117611663 | − |
| 5772 | TATGTAAATTCAGAG | | TATGTAAATTCAGAG | | | | |
| | CTTTGTGGAACAGAG | | CTTTGTGGAACAGAG | | | | |
| | TTTCT | | TTTCA | | | | |
| rs13930 | ACAGGTACAAGAACC | 1077 | | | 7 | 117611671 | − |
| 4906 | AGTTGGCAGTATGTA | | | | | | |
| | AATTCAGAGCTTTGT | | | | | | |
| | GGAAC | | | | | | |
| rs13930 | ACAGGTACAAGAACC | 1078 | | | 7 | 117611671 | − |
| 4906 | AGTTGGCAGTATGTA | | | | | | |
| | AATTCAGAGCTTTGT | | | | | | |
| | GGAAC | | | | | | |
| rs13930 | ACAGGTACAAGAACC | 1079 | | | 7 | 117611671 | − |
| 4906 | AGTTGGCAGTATGTA | | | | | | |
| | AATTCAGAGCTTTGT | | | | | | |
| | GGAAC | | | | | | |
| rs79635 | GGACGGCAGCCTTAC | 1080 | GGACGGCAGCCTTAC | 2022 | 7 | 117611695 | + |
| 528 | TTTGAAACTCYGTTC | | TTTGAAACTCYGTTC | | | | |
| | CACAAAGCTCTGAAT | | CACAAAGCTCTGAAT | | | | |
| | TTACA | | TTACC | | | | |
| rs79635 | GGACGGCAGCCTTAC | 1081 | GGACGGCAGCCTTAC | 2023 | 7 | 117611695 | + |
| 528 | TTTGAAACTCYGTTC | | TTTGAAACTCYGTTC | | | | |
| | CACAAAGCTCTGAAT | | CACAAAGCTCTGAAT | | | | |
| | TTACA | | TTACC | | | | |
| rs79635 | GGACGGCAGCCTTAC | 1082 | GGACGGCAGCCTTAC | 2024 | 7 | 117611695 | + |
| 528 | TTTGAAACTCYGTTC | | TTTGAAACTCYGTTC | | | | |
| | CACAAAGCTCTGAAT | | CACAAAGCTCTGAAT | | | | |
| | TTACA | | TTACC | | | | |
| rs36210 | CATACTGCCAACTGG | 1083 | CATACTGCCAACTGG | 2025 | 7 | 117611743 | + |
| 737 | TTCTTGTACCTGTCA | | TTCTTGTACCTGTCA | | | | |
| | ACACTGCGCTGGTTC | | ACACTGCGCTGGTTC | | | | |
| | CAAAA | | CAAAT | | | | |
| rs36210 | AATGAAGGTAACAGC | 1084 | AATGAAGGTAACAGC | 2026 | 7 | 117611743 | − |
| 737 | AATGAAGAAGATGAC | | AATGAAGAAGATGAC | | | | |
| | AAAAATCATTTCTAT | | AAAAATCATTTCTAT | | | | |
| | TCTCT | | TCTCA | | | | |
| rs36210 | AATGAAGGTAACAGC | 1085 | AATGAAGGTAACAGC | 2027 | 7 | 117611743 | − |
| 737 | AATGAAGAAGATGAC | | AATGAAGAAGATGAC | | | | |
| | AAAAATCATTTCTAT | | AAAAATCATTTCTAT | | | | |
| | TCTCT | | TCTCA | | | | |
| rs75541 | AGCCATGAATATCAT | 1086 | AGCCATGAATATCAT | 2028 | 7 | 117614699 | + |
| 969 | GAGTACATTGCAGTG | | GAGTACATTGCAGTG | | | | |
| | GGCTGTAAACTCCAG | | GGCTGTAAACTCCAG | | | | |
| | CATAC | | CATAG | | | | |
| rs75541 | AGCCATGAATATCAT | 1087 | AGCCATGAATATCAT | 2029 | 7 | 117614699 | + |
| 969 | GAGTACATTGCAGTG | | GAGTACATTGCAGTG | | | | |
| | GGCTGTAAACTCCAG | | GGCTGTAAACTCCAG | | | | |
| | CATAC | | CATAG | | | | |
| rs75541 | AGCCATGAATATCAT | 1088 | AGCCATGAATATCAT | 2030 | 7 | 117614699 | + |
| 969 | GAGTACATTGCAGTG | | GAGTACATTGCAGTG | | | | |
| | GGCTGTAAACTCCAG | | GGCTGTAAACTCCAG | | | | |
| | CATAC | | CATAG | | | | |
| rs74767 | TGACTTGGTAGGTTT | 1089 | | | 7 | 117627537 | − |
| 530 | ACCTTCTGTTGGCAT | | | | | | |
| | GTCAATGAACTTAAA | | | | | | |
| | GACTC | | | | | | |
| rs74767 | TGACTTGGTAGGTTT | 1090 | | | 7 | 117627537 | − |
| 530 | ACCTTCTGTTGGCAT | | | | | | |
| | GTCAATGAACTTAAA | | | | | | |
| | GACTC | | | | | | |
| rs74767 | TGACTTGGTAGGTTT | 1091 | | | 7 | 117627537 | − |
| 530 | ACCTTCTGTTGGCAT | | | | | | |
| | GTCAATGAACTTAAA | | | | | | |
| | GACTC | | | | | | |
| rs74767 | TGACTTGGTAGGTTT | 1092 | | | 7 | 117627537 | − |
| 530 | ACCTTCTGTTGGCAT | | | | | | |
| | GTCAATGAACTTAAA | | | | | | |
| | GACTC | | | | | | |
| rs34911 | TACACAGAAGGTGGA | 1093 | | | 7 | 117627758 | + |
| 792 | AATGCCATATTAGAG | | | | | | |
| | AACATTTCCTTCTCA | | | | | | |
| | ATAAG | | | | | | |
| rs34911 | TACACAGAAGGTGGA | 1094 | | | 7 | 117627758 | + |
| 792 | AATGCCATATTAGAG | | | | | | |
| | AACATTTCCTTCTCA | | | | | | |
| | ATAAG | | | | | | |
| rs34911 | TACACAGAAGGTGGA | 1095 | | | 7 | 117627758 | + |
| 792 | AATGCCATATTAGAG | | | | | | |
| | AACATTTCCTTCTCA | | | | | | |
| | ATAAG | | | | | | |
| rs75039 | AATTGCATTGTACCA | 1096 | AATTGCATTGTACCA | 2031 | 7 | 117639961 | − |
| 782 | TGAATAGAACATTTC | | TGAATAGAACATTTC | | | | |
| | CTTTCAGGGTGTCTT | | CTTTCAGGGTGTCTT | | | | |
| | ACTCA | | ACTCG | | | | |
| rs75039 | AATTGCATTGTACCA | 1097 | AATTGCATTGTACCA | 2032 | 7 | 117639961 | − |
| 782 | TGAATAGAACATTTC | | TGAATAGAACATTTC | | | | |
| | CTTTCAGGGTGTCTT | | CTTTCAGGGTGTCTT | | | | |
| | ACTCA | | ACTCG | | | | |
| rs75039 | AATTGCATTGTACCA | 1098 | AATTGCATTGTACCA | 2033 | 7 | 117639961 | − |
| 782 | TGAATAGAACATTTC | | TGAATAGAACATTTC | | | | |
| | CTTTCAGGGTGTCTT | | CTTTCAGGGTGTCTT | | | | |
| | ACTCA | | ACTCG | | | | |
| rs26760 | TGTCACAGAAGTGAT | 1099 | TGTCACAGAAGTGAT | 2034 | 7 | 117642451 | + |
| 6723 | CCCATCACTTTTACC | | CCCATCACTTTTACC | | | | |
| | TTATAGGTGGGCCTC | | TTATAGGTGGGCCTC | | | | |
| | TTGGA | | TTGGG | | | | |
| rs26760 | TGTCACAGAAGTGAT | 1100 | TGTCACAGAAGTGAT | 2035 | 7 | 117642451 | + |
| 6723 | CCCATCACTTTTACC | | CCCATCACTTTTACC | | | | |
| | TTATAGGTGGGCCTC | | TTATAGGTGGGCCTC | | | | |
| | TTGGA | | TTGGG | | | | |
| rs26760 | TGTCACAGAAGTGAT | 1101 | TGTCACAGAAGTGAT | 2036 | 7 | 117642451 | + |
| 6723 | CCCATCACTTTTACC | | CCCATCACTTTTACC | | | | |
| | TTATAGGTGGGCCTC | | TTATAGGTGGGCCTC | | | | |
| | TTGGA | | TTGGG | | | | |
| rs39750 | ATCCCATCACTTTTA | 1102 | | | 7 | 117642465 | + |
| 8602 | CCTTATAGGTGGGCC | | | | | | |
| | TCTTGGGAAGAACTG | | | | | | |
| | GATCA | | | | | | |
| rs39750 | TCCTTCAGTGTTCAG | 1103 | | | 7 | 117642465 | − |
| 8602 | TAGTCTCAAAAAAGC | | | | | | |
| | TGATAACAAAGTACT | | | | | | |
| | CTTCC | | | | | | |
| rs39750 | ATCCCATCACTTTTA | 1104 | | | 7 | 117642465 | + |
| 8602 | CCTTATAGGTGGGCC | | | | | | |
| | TCTTGGGAAGAACTG | | | | | | |
| | GATCA | | | | | | |
| rs74503 | CACTTTTACCTTATA | 1105 | | | 7 | 117642472 | + |
| 330 | GGTGGGCCTCTTGGG | | | | | | |
| | AAGAACTGGATCAGG | | | | | | |
| | GAAGA | | | | | | |
| rs74503 | CACTTTTACCTTATA | 1106 | | | 7 | 117642472 | + |
| 330 | GGTGGGCCTCTTGGG | | | | | | |
| | AAGAACTGGATCAGG | | | | | | |
| | GAAGA | | | | | | |
| rs12190 | ATAGGTGGGCCTCTT | 1107 | ATAGGTGGGCCTCTT | 2037 | 7 | 117642483 | + |
| 9041 | GGGAAGAACTGGATC | | GGGAAGAACTGGATC | | | | |
| | AGGGAAGAGTACTTT | | AGGGAAGAGTACTTT | | | | |
| | GTTAT | | GTTAC | | | | |
| rs12190 | TATAGGTGGGCCTCT | 1108 | | | 7 | 117642483 | + |
| 9041 | TGGGAAGAACTGGAT | | | | | | |
| | CAGGGAAGAGTACTT | | | | | | |
| | TGTTA | | | | | | |
| rs11971 | AAGGCTTTCCTCCAC | 1109 | AAGGCTTTCCTCCAC | 2038 | 7 | 117642528 | − |
| 167 | TGTTGCAAAGTTATT | | TGTTGCAAAGTTATT | | | | |
| | GAATCCCAAGACACA | | GAATCCCAAGACACA | | | | |
| | CCATT | | CCATC | | | | |
| rs11971 | AAAGGCTTTCCTCCA | 1110 | | | 7 | 117642528 | − |
| 167 | CTGTTGCAAAGTTAT | | | | | | |
| | TGAATCCCAAGACAC | | | | | | |
| | ACCAT | | | | | | |
| rs11971 | AAAGGCTTTCCTCCA | 1111 | | | 7 | 117642528 | − |
| 167 | CTGTTGCAAAGTTAT | | | | | | |
| | TGAATCCCAAGACAC | | | | | | |
| | ACCAT | | | | | | |
| rs77010 | AAATCCAGATCGATG | 1112 | AAATCCAGATCGATG | 2039 | 7 | 117642566 | + |
| 898 | GTGTGTCTTGGGATT | | GTGTGTCTTGGGATT | | | | |
| | CAATAACTTTGCAAC | | CAATAACTTTGCAAC | | | | |
| | AGTGA | | AGTGG | | | | |
| rs77010 | AAATCCAGATCGATG | 1113 | AAATCCAGATCGATG | 2040 | 7 | 117642566 | + |
| 898 | GTGTGTCTTGGGATT | | GTGTGTCTTGGGATT | | | | |
| | CAATAACTTTGCAAC | | CAATAACTTTGCAAC | | | | |
| | AGTGA | | AGTGG | | | | |
| rs77010 | AAATCCAGATCGATG | 1114 | AAATCCAGATCGATG | 2041 | 7 | 117642566 | + |
| 898 | GTGTGTCTTGGGATT | | GTGTGTCTTGGGATT | | | | |
| | CAATAACTTTGCAAC | | CAATAACTTTGCAAC | | | | |
| | AGTGA | | AGTGG | | | | |
| rs80034 | CTGCAACTTTCCATA | 1115 | CTGCAACTTTCCATA | 2042 | 7 | 117652877 | − |
| 486 | TTTCTTGATCACTCC | | TTTCTTGATCACTCC | | | | |
| | ACTGTTCATAGGGAT | | ACTGTTCATAGGGAT | | | | |
| | CCAAG | | CCAAC | | | | |
| rs80034 | CTGCAACTTTCCATA | 1116 | CTGCAACTTTCCATA | 2043 | 7 | 117652877 | − |
| 486 | TTTCTTGATCACTCC | | TTTCTTGATCACTCC | | | | |
| | ACTGTTCATAGGGAT | | ACTGTTCATAGGGAT | | | | |
| | CCAAG | | CCAAC | | | | |
| rs80034 | CTGCAACTTTCCATA | 1117 | CTGCAACTTTCCATA | 2044 | 7 | 117652877 | − |
| 486 | TTTCTTGATCACTCC | | TTTCTTGATCACTCC | | | | |
| | ACTGTTCATAGGGAT | | ACTGTTCATAGGGAT | | | | |
| | CCAAG | | CCAAC | | | | |
| rs19392 | TCTTCGCCTTACTGA | 1118 | | | 7 | 117664770 | − |
| 2525 | GAACAGATCTAGCCA | | | | | | |
| | AGCACATCAACTGCT | | | | | | |
| | TGTGG | | | | | | |
| rs19392 | TCTTCGCCTTACTGA | 1119 | | | 7 | 117664770 | − |
| 2525 | GAACAGATCTAGCCA | | | | | | |
| | AGCACATCAACTGCT | | | | | | |
| | TGTGG | | | | | | |
| rs41303 | CATTCACCACCATGT | 1120 | | | 7 | 99250393 | + |
| 343 | CAAGGTACTCCATCT | | | | | | |
| | GTACCACGGCATCAT | | | | | | |
| | AGGTA | | | | | | |
| rs41303 | CATTCACCACCATGT | 1121 | | | 7 | 99250393 | + |
| 343 | CAAGGTACTCCATCT | | | | | | |
| | GTACCACGGCATCAT | | | | | | |
| | AGGTA | | | | | | |
| rs77674 | CCAAGGCTTCATATG | 1122 | | | 7 | 99270539 | + |
| 6 | ATGAAGGGTAATGTG | | | | | | |
| | GTCCAAACAGGGAAG | | | | | | |
| | AGATA | | | | | | |
| rs77674 | CCAAGGCTTCATATG | 1123 | | | 7 | 99270539 | + |
| 6 | ATGAAGGGTAATGTG | | | | | | |
| | GTCCAAACAGGGAAG | | | | | | |
| | AGATA | | | | | | |
| rs28365 | TGAAATCAATGGGGT | 1124 | | | 7 | 99652613 | − |
| 083 | ATTCATTCCCAAAGG | | | | | | |
| | GTCAATGGTGGTGAT | | | | | | |
| | TCCAA | | | | | | |
| rs28365 | TGAAATCAATGGGGT | 1125 | | | 7 | 99652613 | |
| 083 | ATTCATTCCCAAAGG | | | | | | |
| | GTCAATGGTGGTGAT | | | | | | |
| | TCCAA | | | | | | |
| rs28365 | TGAAATCAATGGGGT | 1126 | | | 7 | 99652613 | − |
| 083 | ATTCATTCCCAAAGG | | | | | | |
| | GTCAATGGTGGTGAT | | | | | | |
| | TCCAA | | | | | | |
| rs41303 | CATTCACCACCATGT | 1127 | | | 7 | 99652770 | + |
| 343 | CAAGGTACTCCATCT | | | | | | |
| | GTACCACGGCATCAT | | | | | | |
| | AGGTA | | | | | | |
| rs28383 | TCTTCCCTTCATCTC | 1128 | | | 7 | 99660516 | + |
| 479 | CAGGGGTCATCCCCT | | | | | | |
| | CACCTTATTGGGCAA | | | | | | |
| | AACTG | | | | | | |
| rs28383 | TCTTCCCTTCATCTC | 1129 | | | 7 | 99660516 | + |
| 479 | CAGGGGTCATCCCCT | | | | | | |
| | CACCTTATTGGGCAA | | | | | | |
| | AACTG | | | | | | |
| rs28383 | TCTTCCCTTCATCTC | 1130 | | | 7 | 99660516 | + |
| 479 | CAGGGGTCATCCCCT | | | | | | |
| | CACCTTATTGGGCAA | | | | | | |
| | AACTG | | | | | | |
| rs10264 | ATACTTATTGAGAGA | 1131 | | | 7 | 99665212 | + |
| 272 | AATAATGGATCTAAG | | | | | | |
| | AAACCAAATTTTAGG | | | | | | |
| | AACTT | | | | | | |
| rs10264 | ATACTTATTGAGAGA | 1132 | | | 7 | 99665212 | + |
| 272 | AATAATGGATCTAAG | | | | | | |
| | AAACCAAATTTTAGG | | | | | | |
| | AACTT | | | | | | |
| rs10264 | AACATCGACTCTCTC | 1133 | | | 7 | 99665212 | − |
| 272 | AACAATCCACAAGAC | | | | | | |
| | CCCTTTGTGGAGAGC | | | | | | |
| | ACTAA | | | | | | |
| rs56411 | CTAAGAAACCAAATT | 1134 | | | 7 | 99665237 | + |
| 402 | TTAGGAACTTCTTAG | | | | | | |
| | TGCTCTCCACAAAGG | | | | | | |
| | GGTCT | | | | | | |
| rs56411 | CTAAGAAACCAAATT | 1135 | | | 7 | 99665237 | + |
| 402 | TTAGGAACTTCTTAG | | | | | | |
| | TGCTCTCCACAAAGG | | | | | | |
| | GGTCT | | | | | | |
| rs56411 | CTAAGAAACCAAATT | 1136 | | | 7 | 99665237 | + |
| 402 | TTAGGAACTTCTTAG | | | | | | |
| | TGCTCTCCACAAAGG | | | | | | |
| | GGTCT | | | | | | |
| rs55965 | TCCCCAGATTCATTC | 1137 | | | 7 | 99666950 | + |
| 422 | TTTACATTTCTAATT | | | | | | |
| | AAGACTCATCTTATT | | | | | | |
| | TTCAT | | | | | | |
| rs55965 | CCCCAGATTCATTCT | 1138 | CCCCAGATTCATTCT | 2045 | 7 | 99666950 | + |
| 422 | TTACATTTCTAATTA | | TTACATTTCTAATTA | | | | |
| | AGACTCATCTTATTT | | AGACTCATCTTATTT | | | | |
| | TCATA | | TCATG | | | | |
| rs55965 | CCCCAGATTCATTCT | 1139 | CCCCAGATTCATTCT | 2046 | 7 | 99666950 | + |
| 422 | TTACATTTCTAATTA | | TTACATTTCTAATTA | | | | |
| | AGACTCATCTTATTT | | AGACTCATCTTATTT | | | | |
| | TCATA | | TCATG | | | | |
| rs77674 | CCAAGGCTTCATATG | 1140 | | | 7 | 99672916 | + |
| 6 | ATGAAGGGTAATGTG | | | | | | |
| | GTCCAAACAGGGAAG | | | | | | |
| | AGATA | | | | | | |
| rs55817 | GTCACAATCCCTGTG | 1141 | | | 7 | 99676198 | − |
| 950 | ACCTGATTTCTGTTT | | | | | | |
| | CACTTTGTAGATATG | | | | | | |
| | GGACC | | | | | | |
| rs55817 | GTCACAATCCCTGTG | 1142 | | | 7 | 99676198 | − |
| 950 | ACCTGATTTCTGTTT | | | | | | |
| | CACTTTGTAGATATG | | | | | | |
| | GGACC | | | | | | |
| rs55817 | GTCACAATCCCTGTG | 1143 | | | 7 | 99676198 | − |
| 950 | ACCTGATTTCTGTTT | | | | | | |
| | CACTTTGTAGATATG | | | | | | |
| | GGACC | | | | | | |
| rs22300 | ATCAGCAAGACACTC | 1144 | | | X | 153760654 | − |
| 37 | TCTCCCTCACAGAAC | | | | | | |
| | GTGAAGCTCCCTGAC | | | | | | |
| | GCCTA | | | | | | |
| rs13785 | CGGCCACATCATGGA | 1145 | | | X | 153760987 | + |
| 2345 | ACTGCAGCCTCACCT | | | | | | |
| | CGGCCTTGCGCTCGT | | | | | | |
| | TCAGG | | | | | | |
| rs76723 | CCAGTACGTGGGGAA | 1146 | | | X | 153761240 | − |
| 693 | CCCCGATGGAGAGGG | | | | | | |
| | CGAGGCCACCAAAGG | | | | | | |
| | GTACC | | | | | | |
| rs50308 | TGCCCAGGTAGTGGT | 1147 | | | X | 153762634 | + |
| 68 | CGATGCGGTAGATCT | | | | | | |
| | GGTCCTCACGGAACA | | | | | | |
| | GGGAG | | | | | | |
| rs50308 | TGCCCAGGTAGTGGT | 1148 | | | X | 153762634 | + |
| 68 | CGATGCGGTAGATCT | | | | | | |
| | GGTCCTCACGGAACA | | | | | | |
| | GGGAG | | | | | | |
| rs78478 | GGCAGTGGTGGGACA | 1149 | GGCAGTGGTGGGACA | 2047 | X | 153764383 | + |
| 128 | CACTTACCAGATGGT | | CACTTACCAGATGGT | | | | |
| | GGGGTAGATCTTCTT | | GGGGTAGATCTTCTT | | | | |
| | CTTGC | | CTTGG | | | | |
| rs78478 | GGCAGTGGTGGGACA | 1150 | GGCAGTGGTGGGACA | 2048 | X | 153764383 | + |
| 128 | CACTTACCAGATGGT | | CACTTACCAGATGGT | | | | |
| | GGGGTAGATCTTCTT | | GGGGTAGATCTTCTT | | | | |
| | CTTGC | | CTTGG | | | | |
| X_ | GGGCTCAGAGCTTGT | 1151 | | | X | 154532046 | + |
| 154532046 | GGGGGTTCACCCACT | | | | | | |
| | TGTAGGTGCCCTCAT | | | | | | |
| | ACTGG | | | | | | |
| X_ | GGGCTCAGAGCTTGT | 1152 | | | X | 154532046 | + |
| 154532046 | GGGGGTTCACCCACT | | | | | | |
| | TGTAGGTGCCCTCAT | | | | | | |
| | ACTGG | | | | | | |
| X_ | GGGCTCAGAGCTTGT | 1153 | | | X | 154532046 | + |
| 154532046 | GGGGGTTCACCCACT | | | | | | |
| | TGTAGGTGCCCTCAT | | | | | | |
| | ACTGG | | | | | | |
| X_ | CCACCCGTCACTCTC | 1154 | | | X | 154532057 | − |
| 154532057 | CAGCCGAGGCCCCAC | | | | | | |
| | GGAGGCAGACGAGCT | | | | | | |
| | GATGA | | | | | | |
| X_ | CCACCCGTCACTCTC | 1155 | | | X | 154532057 | − |
| 154532057 | CAGCCGAGGCCCCAC | | | | | | |
| | GGAGGCAGACGAGCT | | | | | | |
| | GATGA | | | | | | |
| X_ | CCACCCGTCACTCTC | 1156 | | | X | 154532057 | − |
| 154532057 | CAGCCGAGGCCCCAC | | | | | | |
| | GGAGGCAGACGAGCT | | | | | | |
| | GATGA | | | | | | |
| X_ | TGCCCTCATACTGGA | 1157 | | | X | 154532082 | + |
| 154532082 | AACCCACTCTCTTCA | | | | | | |
| | TCAGCTCGTCTGCCT | | | | | | |
| | CCGTG | | | | | | |
| X_ | TGCCCTCATACTGGA | 1158 | | | X | 154532082 | + |
| 154532082 | AACCCACTCTCTTCA | | | | | | |
| | TCAGCTCGTCTGCCT | | | | | | |
| | CCGTG | | | | | | |
| X_ | TGCCCTCATACTGGA | 1159 | | | X | 154532082 | + |
| 154532082 | AACCCACTCTCTTCA | | | | | | |
| | TCAGCTCGTCTGCCT | | | | | | |
| | CCGTG | | | | | | |
| X_ | GCCCTCATACTGGAA | 1160 | | | X | 154532083 | + |
| 154532083 | ACCCACTCTCTTCAT | | | | | | |
| | CAGCTCGTCTGCCTC | | | | | | |
| | CGTGG | | | | | | |
| X_ | GCCCTCATACTGGAA | 1161 | | | X | 154532083 | + |
| 154532083 | ACCCACTCTCTTCAT | | | | | | |
| | CAGCTCGTCTGCCTC | | | | | | |
| | CGTGG | | | | | | |
| X_ | GCCCTCATACTGGAA | 1162 | | | X | 154532083 | + |
| 154532083 | ACCCACTCTCTTCAT | | | | | | |
| | CAGCTCGTCTGCCTC | | | | | | |
| | CGTGG | | | | | | |
| X_ | CCTCATACTGGAAAC | 1163 | | | X | 154532085 | + |
| 154532085 | CCACTCTCTTCATCA | | | | | | |
| | GCTCGTCTGCCTCCG | | | | | | |
| | TGRRG | | | | | | |
| X_ | CCTCATACTGGAAAC | 1164 | | | X | 154532085 | + |
| 154532085 | CCACTCTCTTCATCA | | | | | | |
| | GCTCGTCTGCCTCCG | | | | | | |
| | TGRRG | | | | | | |
| X_ | CCTCATACTGGAAAC | 1165 | | | X | 154532085 | + |
| 154532085 | CCACTCTCTTCATCA | | | | | | |
| | GCTCGTCTGCCTCCG | | | | | | |
| | TGRRG | | | | | | |
| X_ | CTCATACTGGAAACC | 1166 | | | X | 154532086 | + |
| 154532086 | CACTCTCTTCATCAG | | | | | | |
| | CTCGTCTGCCTCCGT | | | | | | |
| | GGGGC | | | | | | |
| X_ | CTCATACTGGAAACC | 1167 | | | X | 154532086 | + |
| 154532086 | CACTCTCTTCATCAG | | | | | | |
| | CTCGTCTGCCTCCGT | | | | | | |
| | GGGGC | | | | | | |
| X_ | CTCATACTGGAAACC | 1168 | | | X | 154532086 | + |
| 154532086 | CACTCTCTTCATCAG | | | | | | |
| | CTCGTCTGCCTCCGT | | | | | | |
| | GGGGC | | | | | | |
| rs13785 | TTCACCCCACTGCTG | 1169 | TTCACCCCACTGCTG | 2049 | X | 154532203 | − |
| 2348 | CACCAGATTGAGCTG | | CACCAGATTGAGCTG | | | | |
| | GAGAAGCCCAAGCCC | | GAGAAGCCCAAGCCC | | | | |
| | ATCCG | | ATCCC | | | | |
| rs13785 | TTCACCCCACTGCTG | 1170 | TTCACCCCACTGCTG | 2050 | X | 154532203 | − |
| 2348 | CACCAGATTGAGCTG | | CACCAGATTGAGCTG | | | | |
| | GAGAAGCCCAAGCCC | | GAGAAGCCCAAGCCC | | | | |
| | ATCCG | | ATCCC | | | | |
| X_ | GCGACGAGCTCCGTG | 1171 | | | X | 154532231 | − |
| 154532231 | AGGCCTGGCGTATTT | | | | | | |
| | TCACCCCACTGCTGC | | | | | | |
| | ACCAG | | | | | | |
| X_ | GCGACGAGCTCCGTG | 1172 | | | X | 154532231 | − |
| 154532231 | AGGCCTGGCGTATTT | | | | | | |
| | TCACCCCACTGCTGC | | | | | | |
| | ACCAG | | | | | | |
| X_ | GCGACGAGCTCCGTG | 1173 | | | X | 154532231 | − |
| 154532231 | AGGCCTGGCGTATTT | | | | | | |
| | TCACCCCACTGCTGC | | | | | | |
| | ACCAG | | | | | | |
| rs13785 | CCATGTCCCCTCAGC | 1174 | CCATGTCCCCTCAGC | 2051 | X | 154532245 | − |
| 2344 | GACGAGCTCCGTGAG | | GACGAGCTCCGTGAG | | | | |
| | GCCTGGCGTATTTTC | | GCCTGGCGTATTTTC | | | | |
| | ACCCC | | ACCCG | | | | |
| rs13785 | CCATGTCCCCTCAGC | 1175 | CCATGTCCCCTCAGC | 2052 | X | 154532245 | − |
| 2344 | GACGAGCTCCGTGAG | | GACGAGCTCCGTGAG | | | | |
| | GCCTGGCGTATTTTC | | GCCTGGCGTATTTTC | | | | |
| | ACCCC | | ACCCG | | | | |
| rs13785 | CCATGTCCCCTCAGC | 1176 | CCATGTCCCCTCAGC | 2053 | X | 154532245 | − |
| 2344 | GACGAGCTCCGTGAG | | GACGAGCTCCGTGAG | | | | |
| | GCCTGGCGTATTTTC | | GCCTGGCGTATTTTC | | | | |
| | ACCCC | | ACCCG | | | | |
| rs72554 | CTCCCAAGCCATACC | 1177 | | | X | 154532257 | − |
| 664 | ATGTCCCCTCAGCGA | | | | | | |
| | CGAGCTCCGTGAGGC | | | | | | |
| | CTGGC | | | | | | |
| rs72554 | CTCCCAAGCCATACC | 1178 | | | X | 154532257 | − |
| 664 | ATGTCCCCTCAGCGA | | | | | | |
| | CGAGCTCCGTGAGGC | | | | | | |
| | CTGGC | | | | | | |
| rs72554 | CTCCCAAGCCATACC | 1179 | | | X | 154532257 | − |
| 664 | ATGTCCCCTCAGCGA | | | | | | |
| | CGAGCTCCGTGAGGC | | | | | | |
| | CTGGC | | | | | | |
| X_ | CTCCCAAGCCATACC | 1180 | CTCCCAAGCCATACC | 2054 | X | 154532258 | − |
| 154532258 | ATGTCCCCTCAGCGA | | ATGTCCCCTCAGCGA | | | | |
| | CGAGCTCCGTGAGGC | | CGAGCTCCGTGAGGC | | | | |
| | CTGGT | | CTGGC | | | | |
| X_ | GGCTTGGGCTTCTCC | 1181 | GGCTTGGGCTTCTCC | 2055 | X | 154532258 | + |
| 154532258 | AGCTCAATCTGGTGC | | AGCTCAATCTGGTGC | | | | |
| | AGCAGTSGGGTGAAA | | AGCAGTSGGGTGAAA | | | | |
| | ATACT | | ATACG | | | | |
| X_ | CTCCCAAGCCATACC | 1182 | CTCCCAAGCCATACC | 2056 | X | 154532258 | − |
| 154532258 | ATGTCCCCTCAGCGA | | ATGTCCCCTCAGCGA | | | | |
| | CGAGCTCCGTGAGGC | | CGAGCTCCGTGAGGC | | | | |
| | CTGGA | | CTGGC | | | | |
| rs78260 | GGGCTTCTCCAGCTC | 1183 | | | X | 154532264 | + |
| 8284 | AATCTGGTGCAGCAG | | | | | | |
| | TGGGGTGAAAATACG | | | | | | |
| | CCAGG | | | | | | |
| rs78260 | GGGCTTCTCCAGCTC | 1184 | | | X | 154532264 | + |
| 8284 | AATCTGGTGCAGCAG | | | | | | |
| | TGGGGTGAAAATACG | | | | | | |
| | CCAGG | | | | | | |
| rs78260 | GGGCTTCTCCAGCTC | 1185 | | | X | 154532264 | + |
| 8284 | AATCTGGTGCAGCAG | | | | | | |
| | TGGGGTGAAAATACG | | | | | | |
| | CCAGG | | | | | | |
| X_ | GCTTCTCCAGCTCAA | 1186 | GCTTCTCCAGCTCAA | 2057 | X | 154532265 | + |
| 154532265 | TCTGGTGCAGCAGTS | | TCTGGTGCAGCAGTS | | | | |
| | GGGTGAAAATAYDCC | | GGGTGAAAATAYDCC | | | | |
| | AGGCG | | AGGCC | | | | |
| X_ | GCTTCTCCAGCTCAA | 1187 | GCTTCTCCAGCTCAA | 2058 | X | 154532265 | + |
| 154532265 | TCTGGTGCAGCAGTS | | TCTGGTGCAGCAGTS | | | | |
| | GGGTGAAAATAYDCC | | GGGTGAAAATAYDCC | | | | |
| | AGGCG | | AGGCC | | | | |
| X_ | GCTTCTCCAGCTCAA | 1188 | GCTTCTCCAGCTCAA | 2059 | X | 154532265 | + |
| 154532265 | TCTGGTGCAGCAGTS | | TCTGGTGCAGCAGTS | | | | |
| | GGGTGAAAATAYDCC | | GGGTGAAAATAYDCC | | | | |
| | AGGCG | | AGGCC | | | | |
| rs72554 | GTGCCACCGGCCTCC | 1189 | GTGCCACCGGCCTCC | 2060 | X | 154532269 | − |
| 665 | CAAGCCATACCATGT | | CAAGCCATACCATGT | | | | |
| | CCCCTCAGCGACGAG | | CCCCTCAGCGACGAG | | | | |
| | CTCCT | | CTCCG | | | | |
| rs72554 | GTGCCACCGGCCTCC | 1190 | GTGCCACCGGCCTCC | 2061 | X | 154532269 | − |
| 665 | CAAGCCATACCATGT | | CAAGCCATACCATGT | | | | |
| | CCCCTCAGCGACGAG | | CCCCTCAGCGACGAG | | | | |
| | CTCCT | | CTCCG | | | | |
| rs72554 | CTCCAGCTCAATCTG | 1191 | CTCCAGCTCAATCTG | 2062 | X | 154532269 | + |
| 665 | GTGCAGCAGTGGGGT | | GTGCAGCAGTGGGGT | | | | |
| | GAAAATACDCCAGGY | | GAAAATACDCCAGGY | | | | |
| | STCAA | | STCAC | | | | |
| X_ | AATCTGGTGCAGCAG | 1192 | AATCTGGTGCAGCAG | 2063 | X | 154532278 | + |
| 154532278 | TGGGGTGAAAATACG | | TGGGGTGAAAATACG | | | | |
| | CCAGGCCTCACGGAG | | CCAGGCCTCACGGAG | | | | |
| | CTCGT | | CTCGA | | | | |
| X_ | AATCTGGTGCAGCAG | 1193 | AATCTGGTGCAGCAG | 2064 | X | 154532278 | + |
| 154532278 | TGGGGTGAAAATACG | | TGGGGTGAAAATACG | | | | |
| | CCAGGCCTCACGGAG | | CCAGGCCTCACGGAG | | | | |
| | CTCGT | | CTCGA | | | | |
| X_ | AATCTGGTGCAGCAG | 1194 | AATCTGGTGCAGCAG | 2065 | X | 154532278 | + |
| 154532278 | TGGGGTGAAAATACG | | TGGGGTGAAAATACG | | | | |
| | CCAGGCCTCACGGAG | | CCAGGCCTCACGGAG | | | | |
| | CTCGT | | CTCGA | | | | |
| X_ | ATCTGGTGCAGCAGT | 1195 | ATCTGGTGCAGCAGT | 2066 | X | 154532279 | + |
| 154532279 | GGGGTGAAAATACGC | | GGGGTGAAAATACGC | | | | |
| | CAGGCCTCACGGAGC | | CAGGCCTCACGGAGC | | | | |
| | TCGTG | | TCGTC | | | | |
| X_ | ATCTGGTGCAGCAGT | 1196 | ATCTGGTGCAGCAGT | 2067 | X | 154532279 | + |
| 154532279 | GGGGTGAAAATACGC | | GGGGTGAAAATACGC | | | | |
| | CAGGCCTCACGGAGC | | CAGGCCTCACGGAGC | | | | |
| | TCGTG | | TCGTC | | | | |
| X_ | ATCTGGTGCAGCAGT | 1197 | ATCTGGTGCAGCAGT | 2068 | X | 154532279 | + |
| 154532279 | GGGGTGAAAATACGC | | GGGGTGAAAATACGC | | | | |
| | CAGGCCTCACGGAGC | | CAGGCCTCACGGAGC | | | | |
| | TCGTG | | TCGTC | | | | |
| rs13785 | CCACCCCATAGCCCA | 1198 | | | X | 154532389 | + |
| 2324 | CAGGTATGCAGGGGC | | | | | | |
| | CGGCAGCTGGGCCTC | | | | | | |
| | ACCTG | | | | | | |
| rs13785 | CCACCCCATAGCCCA | 1199 | | | X | 154532389 | + |
| 2324 | CAGGTATGCAGGGGC | | | | | | |
| | CGGCAGCTGGGCCTC | | | | | | |
| | ACCTG | | | | | | |
| rs13785 | TGAGCGCCTCATCCT | 1200 | | | X | 154532389 | |
| 2324 | GGACGTCTTCTGCGG | | | | | | |
| | GAGCCAGATGCACTT | | | | | | |
| | CGTGC | | | | | | |
| rs39812 | ATGAGCGCCTCATCC | 1201 | | | X | 154532390 | − |
| 3546 | TGGACGTCTTCTGCG | | | | | | |
| | GGAGCCAGATGCACT | | | | | | |
| | TCGTG | | | | | | |
| rs39812 | ATGAGCGCCTCATCC | 1202 | | | X | 154532390 | − |
| 3546 | TGGACGTCTTCTGCG | | | | | | |
| | GGAGCCAGATGCACT | | | | | | |
| | TCGTG | | | | | | |
| rs39812 | ACGAGCGCCTCATCC | 1203 | | | X | 154532390 | − |
| 3546 | TGGACGTCTTCTGCG | | | | | | |
| | GGAGCCAGATGCACT | | | | | | |
| | TCGTG | | | | | | |
| X_ | TATGAGCGCCTCATC | 1204 | TATGAGCGCCTCATC | 2069 | X | 154532392 | − |
| 154532392 | CTGGACGTCTTCTGC | | CTGGACGTCTTCTGC | | | | |
| | GGGAGCCAGATGCAC | | GGGAGCCAGATGCAC | | | | |
| | TTCGT | | TTCGA | | | | |
| X_ | TATGAGCGCCTCATC | 1205 | TATGAGCGCCTCATC | 2070 | X | 154532392 | − |
| 154532392 | CTGGACGTCTTCTGC | | CTGGACGTCTTCTGC | | | | |
| | GGGAGCCAGATGCAC | | GGGAGCCAGATGCAC | | | | |
| | TTCGT | | TTCGA | | | | |
| X_ | TATGAGCGCCTCATC | 1206 | TATGAGCGCCTCATC | 2071 | X | 154532392 | − |
| 154532392 | CTGGACGTCTTCTGC | | CTGGACGTCTTCTGC | | | | |
| | GGGAGCCAGATGCAC | | GGGAGCCAGATGCAC | | | | |
| | TTCGT | | TTCGA | | | | |
| X_ | TCCCTGACGCCTATG | 1207 | TCCCTGACGCCTATG | 2072 | X | 154532403 | − |
| 154532403 | AGCGCCTCATCCTGG | | AGCGCCTCATCCTGG | | | | |
| | ACGTCTTCTGCRGGR | | ACGTCTTCTGCRGGR | | | | |
| | GCCAG | | GCCAC | | | | |
| X_ | TCCCTGACGCCTATG | 1208 | TCCCTGACGCCTATG | 2073 | X | 154532403 | − |
| 154532403 | AGCGCCTCATCCTGG | | AGCGCCTCATCCTGG | | | | |
| | ACGTCTTCTGCRGGR | | ACGTCTTCTGCRGGR | | | | |
| | GCCAG | | GCCAC | | | | |
| X_ | TCCCTGACGCCTATG | 1209 | TCCCTGACGCCTATG | 2074 | X | 154532403 | − |
| 154532403 | AGCGCCTCATCCTGG | | AGCGCCTCATCCTGG | | | | |
| | ACGTCTTCTGCRGGR | | ACGTCTTCTGCRGGR | | | | |
| | GCCAG | | GCCAC | | | | |
| X_ | TGAAGCTCCCTGACG | 1210 | | | X | 154532408 | − |
| 154532408 | CCTATGAGCGCYTCA | | | | | | |
| | TCCTGGACGTCTTCT | | | | | | |
| | GCRGG | | | | | | |
| X_ | TGAAGCTCCCTGACG | 1211 | | | X | 154532408 | − |
| 154532408 | CCTATGAGCGCYTCA | | | | | | |
| | TCCTGGACGTCTTCT | | | | | | |
| | GCRGG | | | | | | |
| X_ | TGAAGCTCCCTGACG | 1212 | | | X | 154532408 | − |
| 154532408 | CCTATGAGCGCYTCA | | | | | | |
| | TCCTGGACGTCTTCT | | | | | | |
| | GCRGG | | | | | | |
| rs13785 | GCAGGGGCCGGCAGC | 1213 | | | X | 154532411 | + |
| 2317 | TGGGCCTCACCTGCG | | | | | | |
| | CACGAAGTGCATCTG | | | | | | |
| | GCTCC | | | | | | |
| rs13785 | GCAGGGGCCGGCAGC | 1214 | | | X | 154532411 | + |
| 2317 | TGGGCCTCACCTGCG | | | | | | |
| | CACGAAGTGCATCTG | | | | | | |
| | GCTCC | | | | | | |
| rs13785 | ACGTGAAGCTCCCTG | 1215 | | | X | 154532411 | − |
| 2317 | ACGCCTACGAGCGCC | | | | | | |
| | TCATCCTGGACGTCT | | | | | | |
| | TCTGC | | | | | | |
| X_ | TCACCTGCGCACGAA | 1216 | | | X | 154532432 | + |
| 154532432 | GTGCATCTGGCYCCY | | | | | | |
| | GCAGAAGACGTCCAG | | | | | | |
| | GATGA | | | | | | |
| X_ | TCACCTGCGCACGAA | 1217 | | | X | 154532432 | + |
| 154532432 | GTGCATCTGGCTCCC | | | | | | |
| | GCAGAAGACGTCCAG | | | | | | |
| | GATGA | | | | | | |
| X_ | TCACCTGCGCACGAA | 1218 | | | X | 154532432 | + |
| 154532432 | GTGCATCTGGCTCCC | | | | | | |
| | GCAGAAGACGTCCAG | | | | | | |
| | GATGA | | | | | | |
| rs13785 | CCTGCGCACGAAGTG | 1219 | CCTGCGCACGAAGTG | 2075 | X | 154532434 | + |
| 2337 | CATCTGGCTCCYGCA | | CATCTGGCTCCYGCA | | | | |
| | GAAGACGTCCAGGAT | | GAAGACGTCCAGGAT | | | | |
| | GARGC | | GARGG | | | | |
| rs13785 | CCTGCGCACGAAGTG | 1220 | CCTGCGCACGAAGTG | 2076 | X | 154532434 | + |
| 2337 | CATCTGGCTCCCGCA | | CATCTGGCTCCCGCA | | | | |
| | GAAGACGTCCAGGAT | | GAAGACGTCCAGGAT | | | | |
| | GAGGC | | GAGGG | | | | |
| rs13785 | CCTGCGCACGAAGTG | 1221 | CCTGCGCACGAAGTG | 2077 | X | 154532434 | + |
| 2337 | CATCTGGCTCCCGCA | | CATCTGGCTCCCGCA | | | | |
| | GAAGACGTCCAGGAT | | GAAGACGTCCAGGAT | | | | |
| | GAGGC | | GAGGG | | | | |
| rs22300 | ATCAGCAAGACACTC | 1222 | | | X | 154532439 | − |
| 37 | TCTCCCTCACAGAAC | | | | | | |
| | GTGAAGCTCCCTGAC | | | | | | |
| | GCCTA | | | | | | |
| rs22300 | ATCAGCAAGACACTC | 1223 | | | X | 154532439 | − |
| 37 | TCTCCCTCACAGAAC | | | | | | |
| | GTGAAGCTCCCTGAC | | | | | | |
| | GCCTA | | | | | | |
| X_ | TCCCGCAGAAGACGT | 1224 | | | X | 154532458 | + |
| 154532458 | CCAGGATGAGGCGCT | | | | | | |
| | CATAGGCGTCAGGGA | | | | | | |
| | GCTTC | | | | | | |
| X_ | CATGGTGGCAGGCAG | 1225 | | | X | 154532458 | − |
| 154532458 | TGGCATCAGCAAGAC | | | | | | |
| | ACTCTCTCCCTCACA | | | | | | |
| | GAACR | | | | | | |
| X_ | CATGGTGGCAGGCAG | 1226 | | | X | 154532458 | − |
| 154532458 | TGGCATCAGCAAGAC | | | | | | |
| | ACTCTCTCCCTCACA | | | | | | |
| | GAACR | | | | | | |
| rs78209 | ACATGGTGGCAGGCA | 1227 | | | X | 154532459 | − |
| 8548 | GTGGCATCAGCAAGA | | | | | | |
| | CACTCTCTCCCTCAC | | | | | | |
| | AGAAC | | | | | | |
| rs78209 | ACATGGTGGCAGGCA | 1228 | | | X | 154532459 | − |
| 8548 | GTGGCATCAGCAAGA | | | | | | |
| | CACTCTCTCCCTCAC | | | | | | |
| | AGAAC | | | | | | |
| rs78209 | ACATGGTGGCAGGCA | 1229 | | | X | 154532459 | − |
| 8548 | GTGGCATCAGCAAGA | | | | | | |
| | CACTCTCTCCCTCAC | | | | | | |
| | AGAAC | | | | | | |
| X_ | GGGCCCAGGCCGCCC | 1230 | | | X | 154532570 | + |
| 154532570 | ACCCTCCACACTGCT | | | | | | |
| | CCTTCTCTGTAGGGC | | | | | | |
| | ACCTT | | | | | | |
| X_ | GGGCCCAGGCCGCCC | 1231 | | | X | 154532570 | + |
| 154532570 | ACCCTCCACACTGCT | | | | | | |
| | CCTTCTCTGTAGGGC | | | | | | |
| | ACCTT | | | | | | |
| X_ | GGGCCCAGGCCGCCC | 1232 | | | X | 154532570 | + |
| 154532570 | ACCCTCCACACTGCT | | | | | | |
| | CCTTCTCTGTAGGGC | | | | | | |
| | ACCTT | | | | | | |
| X_ | GACCAAGAAGCCGGG | 1233 | GACCAAGAAGCCGGG | 2078 | X | 154532590 | − |
| 154532590 | CATGTTCTTCAACCC | | CATGTTCTTCAACCC | | | | |
| | CGAGGAGTCGGAGCT | | CGAGGAGTCGGAGCT | | | | |
| | GGACG | | GGACC | | | | |
| X_ | GACCAAGAAGCCGGG | 1234 | GACCAAGAAGCCGGG | 2079 | X | 154532590 | − |
| 154532590 | CATGTTCTTCAACCC | | CATGTTCTTCAACCC | | | | |
| | CRAGGAGTCGGAGCT | | CRAGGAGTCGGAGCT | | | | |
| | GGACG | | GGACC | | | | |
| X_ | GACCAAGAAGCCGGG | 1235 | GACCAAGAAGCCGGG | 2080 | X | 154532590 | − |
| 154532590 | CATGTTCTTCAACCC | | CATGTTCTTCAACCC | | | | |
| | CRAGGAGTCGGAGCT | | CRAGGAGTCGGAGCT | | | | |
| | GGACG | | GGACC | | | | |
| X_ | GTAGGGCACCTTGTA | 1236 | | | X | 154532608 | + |
| 154532608 | TCTGTTGCCGTAGGT | | | | | | |
| | CASGTCCAGCTCCGA | | | | | | |
| | CTCCT | | | | | | |
| X_ | GTAGGGCACCTTGTA | 1237 | | | X | 154532608 | + |
| 154532608 | TCTGTTGCCGTAGGT | | | | | | |
| | CAGGTCCAGCTCCGA | | | | | | |
| | CTCCT | | | | | | |
| X_ | GTAGGGCACCTTGTA | 1238 | | | X | 154532608 | + |
| 154532608 | TCTGTTGCCGTAGGT | | | | | | |
| | CAGGTCCAGCTCCGA | | | | | | |
| | CTCCT | | | | | | |
| X_ | TCTGTTGCCGTAGGT | 1239 | | | X | 154532623 | + |
| 154532623 | CAGGTCCAGCTCCGA | | | | | | |
| | CTCCTYGGGGTTGAA | | | | | | |
| | GAACA | | | | | | |
| X_ | TCTGTTGCCGTAGGT | 1240 | | | X | 154532623 | + |
| 154532623 | CAGGTCCAGCTCCGA | | | | | | |
| | CTCCTYGGGGTTGAA | | | | | | |
| | GAACA | | | | | | |
| X_ | TCTGTTGCCGTAGGT | 1241 | | | X | 154532623 | + |
| 154532623 | CAGGTCCAGCTCCGA | | | | | | |
| | CTCCTCGGGGTTGAA | | | | | | |
| | GAACA | | | | | | |
| rs13785 | GTTGCCGTAGGTCAG | 1242 | GTTGCCGTAGGTCAG | 2081 | X | 154532625 | + |
| 2336 | GTCCAGCTCCGACTC | | GTCCAGCTCCGACTC | | | | |
| | CTYGGGGTTGAAGAA | | CTYGGGGTTGAAGAA | | | | |
| | CAYGG | | CAYGC | | | | |
| rs13785 | GTGCAGCCCAACGAG | 1243 | GTGCAGCCCAACGAG | 2082 | X | 154532625 | − |
| 2336 | GCCGTGTACACCAAG | | GCCGTGTACACCAAG | | | | |
| | ATGATGACCAAGAAG | | ATGATGACCAAGAAG | | | | |
| | YSGKC | | YSGKG | | | | |
| rs13785 | TGTTGCCGTAGGTCA | 1244 | | | X | 154532625 | + |
| 2336 | GGTCCAGCTCCGACT | | | | | | |
| | CCTCGGGGTTGAAGA | | | | | | |
| | ACATG | | | | | | |
| rs13785 | GTTGCCGTAGGTCAG | 1245 | | | X | 154532626 | + |
| 2323 | GTCCAGCTCCGACTC | | | | | | |
| | CTCGGGGTTGAAGAA | | | | | | |
| | CATGC | | | | | | |
| rs13785 | GTTGCCGTAGGTCAG | 1246 | | | X | 154532626 | + |
| 2323 | GTCCAGCTCCGACTC | | | | | | |
| | CTYGGGGTTGAAGAA | | | | | | |
| | CAYGC | | | | | | |
| rs13785 | GTTGCCGTAGGTCAG | 1247 | | | X | 154532626 | + |
| 2323 | GTCCAGCTCCGACTC | | | | | | |
| | CTCGGGGTTGAAGAA | | | | | | |
| | CATGC | | | | | | |
| X_ | GCCGTAGGTCAGGTC | 1248 | GCCGTAGGTCAGGTC | 2083 | X | 154532628 | + |
| 154532628 | CAGCTCCGACTCCTC | | CAGCTCCGACTCCTC | | | | |
| | GGGGTTGAAGAACAT | | GGGGTTGAAGAACAT | | | | |
| | GCCCG | | GCCCC | | | | |
| X_ | GCCGTAGGTCAGGTC | 1249 | GCCGTAGGTCAGGTC | 2084 | X | 154532628 | + |
| 154532628 | CAGCTCCGACTCCTC | | CAGCTCCGACTCCTC | | | | |
| | GGGGTTGAAGAACAT | | GGGGTTGAAGAACAT | | | | |
| | GCCCG | | GCCCC | | | | |
| X_ | GCCGTAGGTCAGGTC | 1250 | GCCGTAGGTCAGGTC | 2085 | X | 154532628 | + |
| 154532628 | CAGCTCCGACTCCTC | | CAGCTCCGACTCCTC | | | | |
| | GGGGTTGAAGAACAT | | GGGGTTGAAGAACAT | | | | |
| | GCCCG | | GCCCC | | | | |
| X_ | GCCGTAGGTCAGGTC | 1251 | | | X | 154532629 | + |
| 154532629 | CAGCTCCGACTCCTC | | | | | | |
| | GGGGTTGAAGAACAT | | | | | | |
| | GCCCG | | | | | | |
| X_ | GCCGTAGGTCAGGTC | 1252 | | | X | 154532629 | + |
| 154532629 | CAGCTCCGACTCCTC | | | | | | |
| | GGGGTTGAAGAACAT | | | | | | |
| | GCCCG | | | | | | |
| X_ | GCCGTAGGTCAGGTC | 1253 | | | X | 154532629 | + |
| 154532629 | CAGCTCCGACTCCTC | | | | | | |
| | GGGGTTGAAGAACAT | | | | | | |
| | GCCCG | | | | | | |
| X_ | AGGTCAGGTCCAGCT | 1254 | | | X | 154532634 | + |
| 154532634 | CCGACTCCTCGGGGT | | | | | | |
| | TGAAGAACATGCCCG | | | | | | |
| | GCTTC | | | | | | |
| X_ | AGGTCAGGTCCAGCT | 1255 | | | X | 154532634 | + |
| 154532634 | CCGACTCCTCGGGGT | | | | | | |
| | TGAAGAACATGCMCS | | | | | | |
| | RCTTC | | | | | | |
| X_ | AGGTCAGGTCCAGCT | 1256 | | | X | 154532634 | + |
| 154532634 | CCGACTCCTCGGGGT | | | | | | |
| | TGAAGAACATGCCCG | | | | | | |
| | GCTTC | | | | | | |
| X_ | AGGTCCAGCTCCGAC | 1257 | | | X | 154532639 | + |
| 154532639 | TCCTCGGGGTTGAAG | | | | | | |
| | AACATGCCCSRCTTC | | | | | | |
| | KTGGT | | | | | | |
| X_ | AGGTCCAGCTCCGAC | 1258 | | | X | 154532639 | + |
| 154532639 | TCCTCGGGGTTGAAG | | | | | | |
| | AACATGCCCGGCTTC | | | | | | |
| | TTGGT | | | | | | |
| X_ | AGGTCCAGCTCCGAC | 1259 | | | X | 154532639 | + |
| 154532639 | TCCTCGGGGTTGAAG | | | | | | |
| | AACATGCCCGGCTTC | | | | | | |
| | TTGGT | | | | | | |
| X_ | CCGACTCCTCGGGGT | 1260 | | | X | 154532649 | + |
| 154532649 | TGAAGAACATGCCCG | | | | | | |
| | GCTTCTTGGTCATCA | | | | | | |
| | TCTTG | | | | | | |
| X_ | CCGACTCCTCGGGGT | 1261 | | | X | 154532649 | + |
| 154532649 | TGAAGAACATGCCCG | | | | | | |
| | GCTTCTTGGTCATCA | | | | | | |
| | TCTTG | | | | | | |
| X_ | CCGACTCCTCGGGGT | 1262 | | | X | 154532649 | + |
| 154532649 | TGAAGAACATGCCCG | | | | | | |
| | GCTTCTTGGTCATCA | | | | | | |
| | TCTTG | | | | | | |
| X_ | CCACCAGCAGTGCAA | 1263 | | | X | 154532661 | − |
| 154532661 | GCGCAACGAGCTGGT | | | | | | |
| | GATCCGCSTGCAGCY | | | | | | |
| | CAACR | | | | | | |
| X_ | CCACCAGCAGTGCAA | 1264 | | | X | 154532661 | − |
| 154532661 | GCGCAACGAGCTGGT | | | | | | |
| | GATCCGCGTGCAGCC | | | | | | |
| | CAACG | | | | | | |
| X_ | CCACCAGCAGTGCAA | 1265 | | | X | 154532661 | − |
| 154532661 | GCGCAACGAGCTGGT | | | | | | |
| | GATCCGCGTGCAGCC | | | | | | |
| | CAACG | | | | | | |
| rs13785 | GTTGAAGAACATGCC | 1266 | | | X | 154532662 | + |
| 2325 | CGGCTTCTTGGTYAT | | | | | | |
| | CATCTTGKTGTACAC | | | | | | |
| | GGCCT | | | | | | |
| rs13785 | TCCACCAGCAGTGCA | 1267 | | | X | 154532662 | − |
| 2325 | AGCGCAACGAGCTGG | | | | | | |
| | TGATCCGCGTGCAGC | | | | | | |
| | CCAAC | | | | | | |
| rs13785 | GTTGAAGAACATGCC | 1268 | | | X | 154532662 | + |
| 2325 | CGGCTTCTTGGTCAT | | | | | | |
| | CATCTTGGTGTACAC | | | | | | |
| | GGCCT | | | | | | |
| X_ | CATCTTCCACCAGCA | 1269 | | | X | 154532667 | − |
| 154532667 | GTGCAAGCGCAACGA | | | | | | |
| | GCTGGTGATCSRCST | | | | | | |
| | GCAGC | | | | | | |
| X_ | CATCTTCCACCAGCA | 1270 | | | X | 154532667 | − |
| 154532667 | GTGCAAGCGCAACGA | | | | | | |
| | GCTGGTGATCSRCST | | | | | | |
| | GCAGC | | | | | | |
| X_ | CATCTTCCACCAGCA | 1271 | | | X | 154532667 | − |
| 154532667 | GTGCAAGCGCAACGA | | | | | | |
| | GCTGGTGATCCGCGT | | | | | | |
| | GCAGC | | | | | | |
| rs13785 | CCCGGCTTCTTGGTC | 1272 | CCCGGCTTCTTGGTC | 2086 | X | 154532674 | + |
| 2335 | ATCATCTTGGTGTAC | | ATCATCTTGGTGTAC | | | | |
| | ACGGCCYYGTTGRGC | | ACGGCCYYGTTGRGC | | | | |
| | TGCAC | | TGCAG | | | | |
| rs13785 | CCCGGCTTCTTGGTC | 1273 | CCCGGCTTCTTGGTC | 2087 | X | 154532674 | + |
| 2335 | ATCATCTTGGTGTAC | | ATCATCTTGGTGTAC | | | | |
| | ACGGCCYYGTTGRGC | | ACGGCCYYGTTGRGC | | | | |
| | TGCAC | | TGCAG | | | | |
| rs13785 | CGGCGACATCTTCCA | 1274 | CGGCGACATCTTCCA | 2088 | X | 154532674 | − |
| 2335 | CCAGCAGTGCAAGCG | | CCAGCAGTGCAAGCG | | | | |
| | CAACGAGCTGGTGAT | | CAACGAGCTGGTGAT | | | | |
| | CCGCG | | CCGCC | | | | |
| rs13785 | GGCCGGCGACATCTT | 1275 | | | X | 154532676 | − |
| 2316 | CCACCAGCAGTGCAA | | | | | | |
| | GCGCAACGAGCTGGT | | | | | | |
| | GATCC | | | | | | |
| rs13785 | GGCCGGCGACATCTT | 1276 | | | X | 154532676 | − |
| 2316 | CCACCAGCAGTGCAA | | | | | | |
| | GCGCAACGAGCTGGT | | | | | | |
| | GATCC | | | | | | |
| rs13785 | GGCCGGCGACATCTT | 1277 | | | X | 154532676 | − |
| 2316 | CCACCAGCAGTGCAA | | | | | | |
| | GCGCAACGAGCTGGT | | | | | | |
| | GATCC | | | | | | |
| X_ | GGCCGGCGACATCTT | 1278 | GGCCGGCGACATCTT | 2089 | X | 154532677 | − |
| 154532677 | CCACCAGCAGTGCAA | | CCACCAGCAGTGCAA | | | | |
| | GCGCRACGRGCTGGT | | GCGCRACGRGCTGGT | | | | |
| | GAYCG | | GAYCC | | | | |
| X_ | GGCCGGCGACATCTT | 1279 | GGCCGGCGACATCTT | 2090 | X | 154532677 | − |
| 154532677 | CCACCAGCAGTGCAA | | CCACCAGCAGTGCAA | | | | |
| | GCGCRACGRGCTGGT | | GCGCRACGRGCTGGT | | | | |
| | GAYCG | | GAYCC | | | | |
| X_ | GGCCGGCGACATCTT | 1280 | GGCCGGCGACATCTT | 2091 | X | 154532677 | − |
| 154532677 | CCACCAGCAGTGCAA | | CCACCAGCAGTGCAA | | | | |
| | GCGCRACGRGCTGGT | | GCGCRACGRGCTGGT | | | | |
| | GAYCG | | GAYCC | | | | |
| X_ | TGTGGCCGGCGACAT | 1281 | | | X | 154532679 | − |
| 154532679 | CTTCCACCAGCAGTG | | | | | | |
| | CAAGCGCAACGAGCT | | | | | | |
| | GGTGA | | | | | | |
| X_ | TGTGGCCGGCGACAT | 1282 | | | X | 154532679 | − |
| 154532679 | CTTCCACCAGCAGTG | | | | | | |
| | CAAGCGCAACGAGCT | | | | | | |
| | GGTGA | | | | | | |
| X_ | TGTGGCCGGCGACAT | 1283 | | | X | 154532679 | − |
| 154532679 | CTTCCACCAGCAGTG | | | | | | |
| | CAAGCGCAACGAGCT | | | | | | |
| | GGTGA | | | | | | |
| X_ | GTTCCATGATGTGGC | 1284 | | | X | 154532688 | − |
| 154532688 | CGGCGACATCTTCCA | | | | | | |
| | CCAGCAGTGCAAGYR | | | | | | |
| | CRACG | | | | | | |
| X_ | GTTCCATGATGTGGC | 1285 | | | X | 154532688 | − |
| 154532688 | CGGCGACATCTTCCA | | | | | | |
| | CCAGCAGTGCAAGYR | | | | | | |
| | CRACG | | | | | | |
| X_ | GTTCCATGATGTGGC | 1286 | | | X | 154532688 | − |
| 154532688 | CGGCGACATCTTCCA | | | | | | |
| | CCAGCAGTGCAAGYR | | | | | | |
| | CRACG | | | | | | |
| X_ | CATCTTGGTGTACAC | 1287 | | | X | 154532692 | + |
| 154532692 | GGCCTCGTTGGGCTG | | | | | | |
| | CACGCGGATCACCAG | | | | | | |
| | CTCGT | | | | | | |
| X_ | TGCAGTTCCATGATG | 1288 | | | X | 154532692 | − |
| 154532692 | TGGCCGGCGACATCT | | | | | | |
| | TCCACCAGCAGTGCR | | | | | | |
| | AGYRC | | | | | | |
| X_ | TGCAGTTCCATGATG | 1289 | | | X | 154532692 | − |
| 154532692 | TGGCCGGCGACATCT | | | | | | |
| | TCCACCAGCAGTGCR | | | | | | |
| | AGYRC | | | | | | |
| rs13785 | GCTGCAGTTCCATGA | 1290 | | | X | 154532694 | − |
| 2321 | TGTGGCCGGCGACAT | | | | | | |
| | CTTCCACCAGCAGTG | | | | | | |
| | CAAGC | | | | | | |
| rs13785 | GCTGCAGTTCCATGA | 1291 | | | X | 154532694 | − |
| 2321 | TGTGGCCGGCGACAT | | | | | | |
| | CTTCCACCAGCAGTG | | | | | | |
| | CAAGC | | | | | | |
| rs13785 | GCTGCAGTTCCATGA | 1292 | | | X | 154532694 | − |
| 2321 | TGTGGCCGGCGACAT | | | | | | |
| | CTTCCACCAGCAGTG | | | | | | |
| | CAAGC | | | | | | |
| rs13785 | GGCTGCAGTTCCATG | 1293 | | | X | 154532695 | − |
| 2334 | ATGTGGCCGGCGACA | | | | | | |
| | TCTTCCACCAGCAGT | | | | | | |
| | GCAAG | | | | | | |
| rs13785 | GGCTGCAGTTCCATG | 1294 | | | X | 154532695 | − |
| 2334 | ATGTGGCCGGCGACA | | | | | | |
| | TCTTCCACCAGCAGT | | | | | | |
| | GCAAG | | | | | | |
| rs13785 | GGCTGCAGTTCCATG | 1295 | | | X | 154532695 | − |
| 2334 | ATGTGGCCGGCGACA | | | | | | |
| | TCTTCCACCAGCAGT | | | | | | |
| | GCAAG | | | | | | |
| rs13785 | GGCTGCAGTTCCATG | 1296 | | | X | 154532695 | − |
| 2334 | ATGTGGCCGGCGACA | | | | | | |
| | TCTTCCACCAGCAGT | | | | | | |
| | GCAAG | | | | | | |
| rs13785 | TGAGGCTGCAGTTCC | 1297 | | | X | 154532698 | − |
| 2320 | ATGATGTGGCCGGCG | | | | | | |
| | ACATCTTCCACCAGC | | | | | | |
| | AGTGC | | | | | | |
| rs13785 | TGAGGCTGCAGTTCC | 1298 | | | X | 154532698 | − |
| 2320 | ATGATGTGGCCGGCG | | | | | | |
| | ACATCTTCCACCAGC | | | | | | |
| | AGTGC | | | | | | |
| rs13785 | TGAGGCTGCAGTTCC | 1299 | | | X | 154532698 | − |
| 2320 | ATGATGTGGCCGGCG | | | | | | |
| | ACATCTTCCACCAGC | | | | | | |
| | AGTGC | | | | | | |
| X_ | TGAGGCTGCAGTTCC | 1300 | TGAGGCTGCAGTTCC | 2092 | X | 154532699 | − |
| 154532699 | ATGATGTGGCCGGCG | | ATGATGTGGCCGGCG | | | | |
| | ACATCYTCCACCAGC | | ACATCYTCCACCAGC | | | | |
| | AGYKC | | AGYKG | | | | |
| X_ | TGAGGCTGCAGTTCC | 1301 | TGAGGCTGCAGTTCC | 2093 | X | 154532699 | − |
| 154532699 | ATGATGTGGCCGGCG | | ATGATGTGGCCGGCG | | | | |
| | ACATCYTCCACCAGC | | ACATCYTCCACCAGC | | | | |
| | AGYKC | | AGYKG | | | | |
| X_ | TGAGGCTGCAGTTCC | 1302 | TGAGGCTGCAGTTCC | 2094 | X | 154532699 | − |
| 154532699 | ATGATGTGGCCGGCG | | ATGATGTGGCCGGCG | | | | |
| | ACATCTTCCACCAGC | | ACATCTTCCACCAGC | | | | |
| | AGTGC | | AGTGG | | | | |
| X_ | GGTGAGGCTGCAGTT | 1303 | | | X | 154532700 | − |
| 154532700 | CCATGATGTGGCCGG | | | | | | |
| | CGACATCTTCCACCA | | | | | | |
| | GCAGT | | | | | | |
| X_ | GGTGAGGCTGCAGTT | 1304 | | | X | 154532700 | − |
| 154532700 | CCATGATGTGGCCGG | | | | | | |
| | CGACATCTTCCACCA | | | | | | |
| | GCAGT | | | | | | |
| X_ | GGTGAGGCTGCAGTT | 1305 | | | X | 154532700 | − |
| 154532700 | CCATGATGTGGCCGG | | | | | | |
| | CGACATCTTCCACCA | | | | | | |
| | GCAGT | | | | | | |
| rs13785 | AGGTGAGGCTGCAGT | 1306 | | | X | 154532701 | − |
| 2322 | TCCATGATGTGGCCG | | | | | | |
| | GCGACRYCYTCCACC | | | | | | |
| | AGCAG | | | | | | |
| rs13785 | AGGTGAGGCTGCAGT | 1307 | | | X | 154532701 | − |
| 2322 | TCCATGATGTGGCCG | | | | | | |
| | GCGACRYCYTCCACC | | | | | | |
| | AGCAG | | | | | | |
| rs13785 | AGGTGAGGCTGCAGT | 1308 | | | X | 154532701 | − |
| 2322 | TCCATGATGTGGCCG | | | | | | |
| | GCGACATCTTCCACC | | | | | | |
| | AGCAG | | | | | | |
| X_ | GTTGGGCTGCACGCG | 1309 | | | X | 154532713 | + |
| 154532713 | GATCACCAGCTCGTT | | | | | | |
| | GCGCTTGCACTGCTG | | | | | | |
| | GTGGA | | | | | | |
| X_ | GTTGGGCTGCACGCG | 1310 | | | X | 154532713 | + |
| 154532713 | GATCACCAGCTCGTT | | | | | | |
| | GCGCTTGCACTGCTG | | | | | | |
| | GTGGA | | | | | | |
| X_ | GTTGGGCTGCACGCG | 1311 | | | X | 154532713 | + |
| 154532713 | GATCACCAGCTCGTT | | | | | | |
| | GCGCTTGCACTGCTG | | | | | | |
| | GTGGA | | | | | | |
| X_ | TGGGCTGCACGCGGA | 1312 | | | X | 154532715 | + |
| 154532715 | TCACCAGCTCGTTGC | | | | | | |
| | GCTTGCACTGCTGGT | | | | | | |
| | GGAAG | | | | | | |
| X_ | TGGGCTGCACGCGGA | 1313 | | | X | 154532715 | + |
| 154532715 | TCACCAGCTCGTTGC | | | | | | |
| | GCTTGCACTGCTGGT | | | | | | |
| | GGAAG | | | | | | |
| X_ | TGGGCTGCACGCGGA | 1314 | | | X | 154532715 | + |
| 154532715 | TCACCAGCTCGTTGC | | | | | | |
| | GCTTGCACTGCTGGT | | | | | | |
| | GGAAG | | | | | | |
| X_ | GGGCTGCACGCGGAT | 1315 | | | X | 154532716 | + |
| 154532716 | CACCAGCTCGTTGCG | | | | | | |
| | CTTGCACTGCTGGTG | | | | | | |
| | GAAGA | | | | | | |
| X_ | GGGCTGCACGCGGAT | 1316 | | | X | 154532716 | + |
| 154532716 | CACCAGCTCGTTGCG | | | | | | |
| | CTTGCACTGCTGGTG | | | | | | |
| | GAAGA | | | | | | |
| X_ | GGGCTGCACGCGGAT | 1317 | | | X | 154532716 | + |
| 154532716 | CACCAGCTCGTTGCG | | | | | | |
| | CTTGCACTGCTGGTG | | | | | | |
| | GAAGA | | | | | | |
| rs37148 | CACGCGGATCACCAG | 1318 | | | X | 154532722 | + |
| 9738 | CTCGTTGCGCTTGCA | | | | | | |
| | CTGCTGGTGGAAGAT | | | | | | |
| | GTCGC | | | | | | |
| rs37148 | CACGCGGATCACCAG | 1319 | | | X | 154532722 | + |
| 9738 | CTCGTTGCGCTTGCA | | | | | | |
| | CTGCTGGTGGAAGAT | | | | | | |
| | GTCGC | | | | | | |
| rs37148 | CACGCGGATCACCAG | 1320 | | | X | 154532722 | + |
| 9738 | CTCGTTGCGCTTGCA | | | | | | |
| | CTGCTGGTGGAAGAT | | | | | | |
| | GTCGC | | | | | | |
| X_ | AAGATGTCGCCGGCC | 1321 | AAGATGTCGCCGGCC | 2095 | X | 154532752 | + |
| 154532752 | ACATCATGGAAYTGC | | ACATCATGGAAYTGC | | | | |
| | AGCCTCACCTCGGCC | | AGCCTCACCTCGGCC | | | | |
| | TYGCG | | TTGCC | | | | |
| X_ | CTGCTGGTGGAAGAT | 1322 | | | X | 154532752 | + |
| 154532752 | GTCGCCGGCCACATC | | | | | | |
| | ATGGAACTGCAGCCT | | | | | | |
| | CACCT | | | | | | |
| X_ | GTGGAAGATGTCGCC | 1323 | | | X | 154532758 | + |
| 154532758 | GGCCACATCATGGAA | | | | | | |
| | CTGCAGCCTCACCTC | | | | | | |
| | GGCCT | | | | | | |
| X_ | GTGGAAGATGTCGCC | 1324 | | | X | 154532758 | + |
| 154532758 | GGCCACATCATGGAA | | | | | | |
| | CTGCAGCCTCACCTC | | | | | | |
| | GGCCT | | | | | | |
| X_ | GTGGAAGATGTCGCC | 1325 | | | X | 154532758 | + |
| 154532758 | GGCCACATCATGGAA | | | | | | |
| | CTGCAGCCTCACCTC | | | | | | |
| | GGCCT | | | | | | |
| rs13785 | TGTCGCCGGCCACAT | 1326 | TGTCGCCGGCCACAT | 2096 | X | 154532765 | + |
| 2329 | CATGGAACTGCAGCC | | CATGGAACTGCAGCC | | | | |
| | TCACCTCGGCCTYGC | | TCACCTCGGCCTYGC | | | | |
| | GCTCT | | GCTCG | | | | |
| rs13785 | TCCGCCACGTAGGGG | 1327 | TCCGCCACGTAGGGG | 2097 | X | 154532765 | − |
| 2329 | TGCCCTTCATCCTGC | | TGCCCTTCATCCTGC | | | | |
| | GCTGCGGCAAGGCCC | | GCTGCGGCAAGGCCC | | | | |
| | TGAAA | | TGAAC | | | | |
| rs13785 | TCCGCCACGTAGGGG | 1328 | TCCGCCACGTAGGGG | 2098 | X | 154532765 | − |
| 2329 | TGCCCTTCATCCTGC | | TGCCCTTCATCCTGC | | | | |
| | GCTGCGGCAAGGCCC | | GCTGCGGCAAGGCCC | | | | |
| | TGAAC | | TGAAG | | | | |
| rs13785 | ATGTCGCCGGCCACA | 1329 | | | X | 154532765 | + |
| 2329 | TCATGGAACTGCAGC | | | | | | |
| | CTCACCTCGGCCTTG | | | | | | |
| | CGCTC | | | | | | |
| rs13785 | CGGCCACATCATGGA | 1330 | | | X | 154532772 | + |
| 2345 | ACTGCAGCCTCACCT | | | | | | |
| | CGGCCTTGCGCTCGT | | | | | | |
| | TCAGG | | | | | | |
| rs13785 | CGGCCACATCATGGA | 1331 | | | X | 154532772 | + |
| 2345 | ACTGCAGCCTCACCT | | | | | | |
| | CGGCCTTGCGCTCGT | | | | | | |
| | TCAGG | | | | | | |
| X_ | GCTGCCCTTTCCGCC | 1332 | | | X | 154532773 | − |
| 154532773 | ACGTAGGGGTGYCCT | | | | | | |
| | TCATCCTGCGCTGCG | | | | | | |
| | GCAAG | | | | | | |
| X_ | GCTGCCCTTTCCGCC | 1333 | | | X | 154532773 | − |
| 154532773 | ACGTAGGGGTGYCCT | | | | | | |
| | TCATCCTGCGCTGCG | | | | | | |
| | GCAAG | | | | | | |
| X_ | GCTGCCCTTTCCGCC | 1334 | | | X | 154532773 | − |
| 154532773 | ACGTAGGGGTGYCCT | | | | | | |
| | TCATCCTGCGCTGCG | | | | | | |
| | GCAAG | | | | | | |
| rs13785 | CACCCTGAGAGAGCT | 1335 | | | X | 154532797 | − |
| 2333 | GGTGCTGAGGCTGCC | | | | | | |
| | CTTTCCGCCACGTAG | | | | | | |
| | GGGTG | | | | | | |
| rs13785 | CACCTCGGCCTTGCG | 1336 | | | X | 154532797 | + |
| 2333 | CTCGTTCAGGGCCTT | | | | | | |
| | GCCGCAGCGCAGGAT | | | | | | |
| | GAAGG | | | | | | |
| rs13785 | CACCTCGGCCTTGCG | 1337 | | | X | 154532797 | + |
| 2333 | CTCGTTCAGGGCCTT | | | | | | |
| | GCCGCAGCGCAGGAT | | | | | | |
| | GAAGG | | | | | | |
| X_ | GTCCACACCCTGAGA | 1338 | | | X | 154532802 | − |
| 154532802 | GAGCTGGTGCTGAGG | | | | | | |
| | CTGCCCTTTCCGCCA | | | | | | |
| | CGTAG | | | | | | |
| X_ | GTCCACACCCTGAGA | 1339 | | | X | 154532802 | − |
| 154532802 | GAGCTGGTGCTGAGG | | | | | | |
| | CTGCCCTTTCCGCCA | | | | | | |
| | CGTAG | | | | | | |
| X_ | GTCCACACCCTGAGA | 1340 | | | X | 154532802 | − |
| 154532802 | GAGCTGGTGCTGAGG | | | | | | |
| | CTGCCCTTTCCGCCA | | | | | | |
| | CGTAG | | | | | | |
| rs34193 | GGGCATGCCCAGTTC | 1341 | GGGCATGCCCAGTTC | 2099 | X | 154532945 | + |
| 178 | TGCCTTGCTGGGCCT | | TGCCTTGCTGGGCCT | | | | |
| | CGAAGGCATCACCTA | | CGAAGGCATCACCTA | | | | |
| | CCATG | | CCATC | | | | |
| rs34193 | GGGCATGCCCAGTTC | 1342 | GGGCATGCCCAGTTC | 2100 | X | 154532945 | + |
| 178 | TGCCTTGCTGGGCCT | | TGCCTTGCTGGGCCT | | | | |
| | CGAAGGCATCACCTA | | CGAAGGCATCACCTA | | | | |
| | CCATG | | CCATC | | | | |
| rs34193 | GGGCATGCCCAGTTC | 1343 | GGGCATGCCCAGTTC | 2101 | X | 154532945 | + |
| 178 | TGCCTTGCTGGGCCT | | TGCCTTGCTGGGCCT | | | | |
| | CGAAGGCATCACCTA | | CGAAGGCATCACCTA | | | | |
| | CCATG | | CCATC | | | | |
| rs39812 | GTTCTGCCTTGCTGG | 1344 | GTTCTGCCTTGCTGG | 2102 | X | 154532956 | + |
| 3544 | GCCTCGAAGGCATCA | | GCCTCGAAGGCATCA | | | | |
| | CCTACCATCCCACCT | | CCTACCATCCCACCT | | | | |
| | CTCAT | | CTCAA | | | | |
| rs39812 | GTTCTGCCTTGCTGG | 1345 | GTTCTGCCTTGCTGG | 2103 | X | 154532956 | + |
| 3544 | GCCTCGAAGGCATCA | | GCCTCGAAGGCATCA | | | | |
| | CCTACCATCCCACCT | | CCTACCATCCCACCT | | | | |
| | CTCAT | | CTCAA | | | | |
| rs39812 | GTTCTGCCTTGCTGG | 1346 | GTTCTGCCTTGCTGG | 2104 | X | 154532956 | + |
| 3544 | GCCTCGAAGGCATCA | | GCCTCGAAGGCATCA | | | | |
| | CCTACCATCCCACCT | | CCTACCATCCCACCT | | | | |
| | CTCAT | | CTCAA | | | | |
| rs13785 | TGGGCCTCGAAGGCA | 1347 | | | X | 154532969 | + |
| 2342 | TCACCTACCATCCCA | | | | | | |
| | CCTCTCATTCTCCAC | | | | | | |
| | ATAGA | | | | | | |
| rs13785 | TGGGCCTCGAAGGCA | 1348 | | | X | 154532969 | + |
| 2342 | TCACCTACCATCCCA | | | | | | |
| | CCTCTCATTCTCCAC | | | | | | |
| | ATAGA | | | | | | |
| rs13785 | TGGGCCTCGAAGGCA | 1349 | | | X | 154532969 | + |
| 2342 | TCACCTACCATCCCA | | | | | | |
| | CCTCTCATTCTCCAC | | | | | | |
| | ATAGA | | | | | | |
| X_ | CCTACCATCCCACCT | 1350 | | | X | 154532987 | + |
| 154532987 | CTCATTCTCCACATA | | | | | | |
| | GARGACGACGGCTGC | | | | | | |
| | AAAAG | | | | | | |
| X_ | CCTACCATCCCACCT | 1351 | | | X | 154532987 | + |
| 154532987 | CTCATTCTCCACATA | | | | | | |
| | GARGACGACGGCTGC | | | | | | |
| | AAAAG | | | | | | |
| X_ | CCTACCATCCCACCT | 1352 | | | X | 154532987 | + |
| 154532987 | CTCATTCTCCACATA | | | | | | |
| | GAGGACGACGGCTGC | | | | | | |
| | AAAAG | | | | | | |
| X_ | TACCATCCCACCTCT | 1353 | | | X | 154532989 | + |
| 154532989 | CATTCTCCACATAGA | | | | | | |
| | RGACGACGGCTGCAA | | | | | | |
| | AAGYG | | | | | | |
| X_ | TACCATCCCACCTCT | 1354 | | | X | 154532989 | + |
| 154532989 | CATTCTCCACATAGA | | | | | | |
| | GGACGACGGCTGCAA | | | | | | |
| | AAGTG | | | | | | |
| X_ | TACCATCCCACCTCT | 1355 | | | X | 154532989 | + |
| 154532989 | CATTCTCCACATAGA | | | | | | |
| | GGACGACGGCTGCAA | | | | | | |
| | AAGTG | | | | | | |
| rs50308 | ACCATCCCACCTCTC | 1356 | | | X | 154532990 | + |
| 69 | ATTCTCCACATAGAG | | | | | | |
| | GACGACGGCTGCAAA | | | | | | |
| | AGTGG | | | | | | |
| rs50308 | ACCATCCCACCTCTC | 1357 | | | X | 154532990 | + |
| 69 | ATTCTCCACATAGAR | | | | | | |
| | GACGACGGCTGCAAA | | | | | | |
| | AGYGG | | | | | | |
| rs50308 | ACCATCCCACCTCTC | 1358 | | | X | 154532990 | + |
| 69 | ATTCTCCACATAGAG | | | | | | |
| | GACGACGGCTGCAAA | | | | | | |
| | AGTGG | | | | | | |
| X_ | CATTCTCCACATAGA | 1359 | | | X | 154533004 | + |
| 154533004 | GGACGACGGCTGCAA | | | | | | |
| | AAGYGKYGGTGGTGG | | | | | | |
| | ACCCG | | | | | | |
| X_ | CATTCTCCACATAGA | 1360 | | | X | 154533004 | + |
| 154533004 | GGACGACGGCTGCAA | | | | | | |
| | AAGYGKYGGTGGTGG | | | | | | |
| | ACCCG | | | | | | |
| X_ | CATTCTCCACATAGA | 1361 | | | X | 154533004 | + |
| 154533004 | GGACGACGGCTGCAA | | | | | | |
| | AAGYGKYGGTGGTGG | | | | | | |
| | ACCCG | | | | | | |
| X_ | GGTCCTGGGCCAGTA | 1362 | GGTCCTGGGCCAGTA | 2105 | X | 154533014 | − |
| 154533014 | CGTGGGGAACCCCGA | | CGTGGGGAACCCCGA | | | | |
| | TGGAGAGGGCRAGGC | | TGGAGAGGGCRAGGC | | | | |
| | CACCA | | CACGG | | | | |
| X_ | GGTCCTGGGCCAGTA | 1363 | GGTCCTGGGCCAGTA | 2106 | X | 154533014 | − |
| 154533014 | CGTGGGGAACCCCGA | | CGTGGGGAACCCCGA | | | | |
| | TGGAGAGGGCRAGGC | | TGGAGAGGGCRAGGC | | | | |
| | CACCA | | CACGG | | | | |
| X_ | GGTCCTGGGCCAGTA | 1364 | GGTCCTGGGCCAGTA | 2107 | X | 154533014 | − |
| 154533014 | CGTGGGGAACCCCGA | | CGTGGGGAACCCCGA | | | | |
| | TGGAGAGGGCGAGGC | | TGGAGAGGGCGAGGC | | | | |
| | CACCA | | CACGG | | | | |
| X_ | AGAGGACGACGGCTG | 1365 | | | X | 154533016 | + |
| 154533016 | CAAAAGTGGCGGTGG | | | | | | |
| | TGGACCCGYGGGGCA | | | | | | |
| | CCGTG | | | | | | |
| X_ | AGAGGACGACGGCTG | 1366 | | | X | 154533016 | + |
| 154533016 | CAAAAGTGGCGGTGG | | | | | | |
| | TGGACCCGYGGGGCA | | | | | | |
| | CCGTG | | | | | | |
| X_ | AGAGGACGACGGCTG | 1367 | | | X | 154533016 | + |
| 154533016 | CAAAAGTGGCGGTGG | | | | | | |
| | TGGACCCGYGGGGCA | | | | | | |
| | CCGTG | | | | | | |
| rs76723 | CCAGTACGTGGGGAA | 1368 | | | X | 154533025 | − |
| 693 | CCCCGATGGAGAGGG | | | | | | |
| | CGAGGCCACCAAAGG | | | | | | |
| | GTACC | | | | | | |
| rs13785 | TGCAAAAGTGGCGGT | 1369 | | | X | 154533029 | + |
| 2347 | GGTGGACCCGCGGGG | | | | | | |
| | CACCGTGGGGTCGTC | | | | | | |
| | CAGGT | | | | | | |
| rs13785 | TGCAAAAGTGGCGGT | 1370 | | | X | 154533029 | + |
| 2347 | GGTGGACCCGCGGGG | | | | | | |
| | CACCGTGGGGTCGTC | | | | | | |
| | CAGGT | | | | | | |
| rs13785 | TGCAAAAGTGGCGGT | 1371 | | | X | 154533029 | + |
| 2347 | GGTGGACCCGCGGGG | | | | | | |
| | CACCGTGGGGTCGTC | | | | | | |
| | CAGGT | | | | | | |
| X_ | CCTGGGCCAGTACGT | 1372 | | | X | 154533031 | − |
| 154533031 | GGGGAACCCCGATGG | | | | | | |
| | AGAGGGCRAGGCCAC | | | | | | |
| | CAAAG | | | | | | |
| X_ | CCTGGGCCAGTACGT | 1373 | | | X | 154533031 | − |
| 154533031 | GGGGAACCCCGATGG | | | | | | |
| | AGAGGGCRAGGCCAC | | | | | | |
| | CAAAG | | | | | | |
| X_ | CCTGGGCCAGTACGT | 1374 | | | X | 154533031 | − |
| 154533031 | GGGGAACCCCGATGG | | | | | | |
| | AGAGGGCRAGGCCAC | | | | | | |
| | CAAAG | | | | | | |
| rs13785 | CCAACAATGTGGTCC | 1375 | | | X | 154533044 | − |
| 2339 | TGGGCCAGTACGTGG | | | | | | |
| | RGAACCCCGATGGAG | | | | | | |
| | AGGGC | | | | | | |
| rs13785 | CCAACAATGTGGTCC | 1376 | | | X | 154533044 | − |
| 2339 | TGGGCCAGTACGTGG | | | | | | |
| | GGAACCCCGATGGAG | | | | | | |
| | AGGGC | | | | | | |
| rs13785 | CCAACAATGTGGTCC | 1377 | | | X | 154533044 | − |
| 2339 | TGGGCCAGTACGTGG | | | | | | |
| | GGAACCCCGATGGAG | | | | | | |
| | AGGGC | | | | | | |
| X_ | TGGGGTCGTCCAGGT | 1378 | | | X | 154533064 | + |
| 154533064 | ACCCTTTGGTGGCCT | | | | | | |
| | YGCCCTCTCCATCGG | | | | | | |
| | GGTTC | | | | | | |
| X_ | CCAGGTACCCTTTGG | 1379 | CCAGGTACCCTTTGG | 2108 | X | 154533072 | + |
| 154533072 | TGGCCTCGCCCTCTC | | TGGCCTCGCCCTCTC | | | | |
| | CATCGGGGTTCYCCA | | CATCGGGGTTCYCCA | | | | |
| | CGTAG | | CGTAC | | | | |
| X_ | CCAGGTACCCTTTGG | 1380 | CCAGGTACCCTTTGG | 2109 | X | 154533072 | + |
| 154533072 | TGGCCTCGCCCTCTC | | TGGCCTCGCCCTCTC | | | | |
| | CATCGGGGTTCYCCA | | CATCGGGGTTCYCCA | | | | |
| | CGTAG | | CGTAC | | | | |
| X_ | CCAGGTACCCTTTGG | 1381 | CCAGGTACCCTTTGG | 2110 | X | 154533072 | + |
| 154533072 | TGGCCTCGCCCTCTC | | TGGCCTCGCCCTCTC | | | | |
| | CATCGGGGTTCYCCA | | CATCGGGGTTCYCCA | | | | |
| | CGTAG | | CGTAC | | | | |
| X_ | GTACCCTTTGGTGGC | 1382 | | | X | 154533077 | + |
| 154533077 | CTCGCCCTCTCCATC | | | | | | |
| | GGGGTTCCCCACGTA | | | | | | |
| | CTGGC | | | | | | |
| X_ | TCAAGGTGTTGAAAT | 1383 | | | X | 154533077 | − |
| 154533077 | GCATCTCAGAGGTGC | | | | | | |
| | AGGCCAACAATGTGK | | | | | | |
| | TCCTG | | | | | | |
| X_ | TCAAGGTGTTGAAAT | 1384 | | | X | 154533077 | − |
| 154533077 | GCATCTCAGAGGTGC | | | | | | |
| | AGGCCAACAATGTGK | | | | | | |
| | TCCTG | | | | | | |
| X_ | CTCAGGTCAAGGTGT | 1385 | | | X | 154533083 | − |
| 154533083 | TGAAATGCATCTCAG | | | | | | |
| | AGGTGCAGGCCAACA | | | | | | |
| | ATGTG | | | | | | |
| X_ | CTCAGGTCAAGGTGT | 1386 | | | X | 154533083 | − |
| 154533083 | TGAAATGCATCTCAG | | | | | | |
| | AGGTGCAGGCCAACA | | | | | | |
| | ATGTG | | | | | | |
| X_ | CTCAGGTCAAGGTGT | 1387 | | | X | 154533083 | − |
| 154533083 | TGAAATGCATCTCAG | | | | | | |
| | AGGTGCAGGCCAACA | | | | | | |
| | ATGTG | | | | | | |
| rs13785 | CTCAACACCCAAGGA | 1388 | | | X | 154533122 | − |
| 2327 | GCCCATTCTCTCCCT | | | | | | |
| | TGGCTTTCTCTCAGG | | | | | | |
| | TCAAG | | | | | | |
| rs13785 | CTCAACACCCAAGGA | 1389 | | | X | 154533122 | − |
| 2327 | GCCCATTCTCTCCCT | | | | | | |
| | TGGCTTTCTCTCAGG | | | | | | |
| | TCAAG | | | | | | |
| rs13785 | CTCAACACCCAAGGA | 1390 | | | X | 154533122 | − |
| 2327 | GCCCATTCTCTCCCT | | | | | | |
| | TGGCTTTCTCTCAGG | | | | | | |
| | TCAAG | | | | | | |
| rs74575 | GTGTCTGGTGGCCAT | 1391 | | | X | 154533586 | − |
| 103 | GGAGAAGCCCGCCTC | | | | | | |
| | CACCAACTCAGATGA | | | | | | |
| | CGTCC | | | | | | |
| rs74575 | GTGTCTGGTGGCCAT | 1392 | | | X | 154533586 | − |
| 103 | GGAGAAGCCCGCCTC | | | | | | |
| | CACCAACTCAGATGA | | | | | | |
| | CGTCC | | | | | | |
| rs74575 | GTGTCTGGTGGCCAT | 1393 | | | X | 154533586 | − |
| 103 | GGAGAAGCCCGCCTC | | | | | | |
| | CACCAACTCAGATGA | | | | | | |
| | CGTCC | | | | | | |
| X_ | TGTGTCTGGTGGCCA | 1394 | | | X | 154533587 | − |
| 154533587 | TGGAGAAGCCCGCCT | | | | | | |
| | CCACCAACTCAGATG | | | | | | |
| | ACGTC | | | | | | |
| X_ | TGTGTCTGGTGGCCA | 1395 | | | X | 154533587 | − |
| 154533587 | TGGAGAAGCCCGCCT | | | | | | |
| | CCACCAACTCAGATG | | | | | | |
| | ACGTC | | | | | | |
| X_ | TGTGTCTGGTGGCCA | 1396 | | | X | 154533587 | − |
| 154533587 | TGGAGAAGCCCGCCT | | | | | | |
| | CCACCAACTCAGATG | | | | | | |
| | ACGTC | | | | | | |
| X_ | GCTGTGTCTGGTGGC | 1397 | | | X | 154533589 | − |
| 154533589 | CATGGAGAAGCCCGC | | | | | | |
| | CTCCACCAACTCAGA | | | | | | |
| | TGACG | | | | | | |
| X_ | GCTGTGTCTGGTGGC | 1398 | | | X | 154533589 | − |
| 154533589 | CATGGAGAAGCCCGC | | | | | | |
| | CTCCACCAACTCAGA | | | | | | |
| | TGACG | | | | | | |
| X_ | GCTGTGTCTGGTGGC | 1399 | | | X | 154533589 | − |
| 154533589 | CATGGAGAAGCCCGC | | | | | | |
| | CTCCACCAACTCAGA | | | | | | |
| | TGACG | | | | | | |
| X_ | ATGCTGTGTCTGGTG | 1400 | | | X | 154533591 | − |
| 154533591 | GCCATGGAGAAGCCC | | | | | | |
| | GCCTCCACCAACTCA | | | | | | |
| | GATGA | | | | | | |
| X_ | ATGCTGTGTCTGGTG | 1401 | | | X | 154533591 | − |
| 154533591 | GCCATGGAGAAGCCC | | | | | | |
| | GCCTCCACCAACTCA | | | | | | |
| | GATGA | | | | | | |
| X_ | ATGCTGTGTCTGGTG | 1402 | | | X | 154533591 | − |
| 154533591 | GCCATGGAGAAGCCC | | | | | | |
| | GCCTCCACCAACTCA | | | | | | |
| | GATGA | | | | | | |
| X_ | GATGCTGTGTCTGGT | 1403 | | | X | 154533592 | − |
| 154533592 | GGCCATGGAGAAGCC | | | | | | |
| | CGCCTCCACCAACTC | | | | | | |
| | AGATG | | | | | | |
| X_ | GATGCTGTGTCTGGT | 1404 | | | X | 154533592 | − |
| 154533592 | GGCCATGGAGAAGCC | | | | | | |
| | CGCCTCCACCAACTC | | | | | | |
| | AGATG | | | | | | |
| X_ | GATGCTGTGTCTGGT | 1405 | | | X | 154533592 | − |
| 154533592 | GGCCATGGAGAAGCC | | | | | | |
| | CGCCTCCACCAACTC | | | | | | |
| | AGATG | | | | | | |
| rs13785 | GCAGATGCTGTGTCT | 1406 | GCAGATGCTGTGTCT | 2111 | X | 154533596 | − |
| 2318 | GGTGGCCATGGAGAA | | GGTGGCCATGGAGAA | | | | |
| | GCCCGCCYYCDCCAA | | GCCCGCCYYCDCCAA | | | | |
| | CTCAG | | CTCAC | | | | |
| rs13785 | GCAGATGCTGTGTCT | 1407 | GCAGATGCTGTGTCT | 2112 | X | 154533596 | − |
| 2318 | GGTGGCCATGGAGAA | | GGTGGCCATGGAGAA | | | | |
| | GCCCGCCYYCDCCAA | | GCCCGCCYYCDCCAA | | | | |
| | CTCAG | | CTCAC | | | | |
| rs13785 | GCAGATGCTGTGTCT | 1408 | GCAGATGCTGTGTCT | 2113 | X | 154533596 | − |
| 2318 | GGTGGCCATGGAGAA | | GGTGGCCATGGAGAA | | | | |
| | GCCCGCCYYCDCCAA | | GCCCGCCYYCDCCAA | | | | |
| | CTCAG | | CTCAC | | | | |
| X_ | CCACCTACTGCAGAT | 1409 | CCACCTACTGCAGAT | 2114 | X | 154533605 | − |
| 154533605 | GCTGTGTCTGGTGGC | | GCTGTGTCTGGTGGC | | | | |
| | CATGGAGAAGCCCGC | | CATGGAGAAGCCCGC | | | | |
| | CTCCA | | CTCCG | | | | |
| X_ | CCACCTACTGCAGAT | 1410 | CCACCTACTGCAGAT | 2115 | X | 154533605 | − |
| 154533605 | GCTGTGTCTGGTGGC | | GCTGTGTCTGGTGGC | | | | |
| | CATGGAGAAGCCCGC | | CATGGAGAAGCCCGC | | | | |
| | CTCCA | | CTCCG | | | | |
| X_ | CCACCTACTGCAGAT | 1411 | CCACCTACTGCAGAT | 2116 | X | 154533605 | − |
| 154533605 | GCTGTGTCTGGTGGC | | GCTGTGTCTGGTGGC | | | | |
| | CATGGAGAAGCCCGC | | CATGGAGAAGCCCGC | | | | |
| | CTCCA | | CTCCG | | | | |
| X_ | GAACCACCTACTGCA | 1412 | | | X | 154533607 | − |
| 154533607 | GATGCTGTGTCTGGT | | | | | | |
| | GGCCATGGAGAASYC | | | | | | |
| | CGCCY | | | | | | |
| X_ | GAACCACCTACTGCA | 1413 | | | X | 154533607 | − |
| 154533607 | GATGCTGTGTCTGGT | | | | | | |
| | GGCCATGGAGAASYC | | | | | | |
| | CGCCY | | | | | | |
| X_ | GAACCACCTACTGCA | 1414 | | | X | 154533607 | − |
| 154533607 | GATGCTGTGTCTGGT | | | | | | |
| | GGCCATGGAGAASYC | | | | | | |
| | CGCCY | | | | | | |
| X_ | AGAACCACCTACTGC | 1415 | | | X | 154533608 | − |
| 154533608 | AGATGCTGTGTCTGG | | | | | | |
| | TGGCCATGGWGAASY | | | | | | |
| | CCGCC | | | | | | |
| X_ | AGAACCACCTACTGC | 1416 | | | X | 154533608 | − |
| 154533608 | AGATGCTGTGTCTGG | | | | | | |
| | TGGCCATGGWGAASY | | | | | | |
| | CCGCC | | | | | | |
| X_ | AGAACCACCTACTGC | 1417 | | | X | 154533608 | − |
| 154533608 | AGATGCTGTGTCTGG | | | | | | |
| | TGGCCATGGWGAASY | | | | | | |
| | CCGCC | | | | | | |
| X_ | TGCACCCCCTACCTT | 1418 | | | X | 154533614 | + |
| 154533614 | CTCATCACGGACGTC | | | | | | |
| | ATCTGAGTTGGHGRR | | | | | | |
| | GGCGG | | | | | | |
| X_ | TGCACCCCCTACCTT | 1419 | | | X | 154533614 | + |
| 154533614 | CTCATCACGGACGTC | | | | | | |
| | ATCTGAGTTGGHGRR | | | | | | |
| | GGCGG | | | | | | |
| X_ | TGCACCCCCTACCTT | 1420 | | | X | 154533614 | + |
| 154533614 | CTCATCACGGACGTC | | | | | | |
| | ATCTGAGTTGGTGGA | | | | | | |
| | GGCGG | | | | | | |
| X_ | CACCCCCTACCTTCT | 1421 | CACCCCCTACCTTCT | 2117 | X | 154533615 | + |
| 154533615 | CATCACGGACGTCAT | | CATCACGGACGTCAT | | | | |
| | CTGAGTTGGTGGAGG | | CTGAGTTGGTGGAGG | | | | |
| | CGGGG | | CGGGC | | | | |
| X_ | CACCCCCTACCTTCT | 1422 | CACCCCCTACCTTCT | 2118 | X | 154533615 | + |
| 154533615 | CATCACGGACGTCAT | | CATCACGGACGTCAT | | | | |
| | CTGAGTTGGTGGAGG | | CTGAGTTGGTGGAGG | | | | |
| | CGGGG | | CGGGC | | | | |
| X_ | CACCCCCTACCTTCT | 1423 | CACCCCCTACCTTCT | 2119 | X | 154533615 | + |
| 154533615 | CATCACGGACGTCAT | | CATCACGGACGTCAT | | | | |
| | CTGAGTTGGTGGAGG | | CTGAGTTGGTGGAGG | | | | |
| | CGGGG | | CGGGC | | | | |
| X_ | CCCTACCTTCTCATC | 1424 | CCCTACCTTCTCATC | 2120 | X | 154533619 | + |
| 154533619 | ACGGACGTCATCTGA | | ACGGACGTCATCTGA | | | | |
| | GTTGGTGGAGGCGGG | | GTTGGTGGAGGCGGG | | | | |
| | CTTCT | | CTTCA | | | | |
| X_ | CCCTACCTTCTCATC | 1425 | CCCTACCTTCTCATC | 2121 | X | 154533619 | + |
| 154533619 | ACGGACGTCATCTGA | | ACGGACGTCATCTGA | | | | |
| | GTTGGTGGRGGCGGR | | GTTGGTGGRGGCGGR | | | | |
| | STTCT | | STTCA | | | | |
| X_ | CCCTACCTTCTCATC | 1426 | CCCTACCTTCTCATC | 2122 | X | 154533619 | + |
| 154533619 | ACGGACGTCATCTGA | | ACGGACGTCATCTGA | | | | |
| | GTTGGTGGAGGCGGG | | GTTGGTGGAGGCGGG | | | | |
| | CTTCT | | CTTCA | | | | |
| X_ | CCCTACCTTCTCATC | 1427 | | | X | 154533620 | + |
| 154533620 | ACGGACGTCATCTGA | | | | | | |
| | GTTGGTGGAGGCGGG | | | | | | |
| | CTTCT | | | | | | |
| X_ | CCCTACCTTCTCATC | 1428 | | | X | 154533620 | + |
| 154533620 | ACGGACGTCATCTGA | | | | | | |
| | GTTGGTGGAGGCGGG | | | | | | |
| | CTTCT | | | | | | |
| X_ | CCCTACCTTCTCATC | 1429 | | | X | 154533620 | + |
| 154533620 | ACGGACGTCATCTGA | | | | | | |
| | GTTGGTGGAGGCGGG | | | | | | |
| | CTTCT | | | | | | |
| X_ | TCATCACGGACGTCA | 1430 | TCATCACGGACGTCA | 2123 | X | 154533629 | + |
| 154533629 | TCTGAGTTGGTGGAG | | TCTGAGTTGGTGGAG | | | | |
| | GCGGGCTTCTCCATG | | GCGGGCTTCTCCATG | | | | |
| | GCCAC | | GCCAG | | | | |
| X_ | TCATCACGGACGTCA | 1431 | TCATCACGGACGTCA | 2124 | X | 154533629 | + |
| 154533629 | TCTGAGTTGGTGGAG | | TCTGAGTTGGTGGAG | | | | |
| | GCGGGCTTCTCCATG | | GCGGGCTTCTCCATG | | | | |
| | GCCAC | | GCCAG | | | | |
| X_ | TCATCACGGACGTCA | 1432 | TCATCACGGACGTCA | 2125 | X | 154533629 | + |
| 154533629 | TCTGAGTTGGTGGAG | | TCTGAGTTGGTGGAG | | | | |
| | GCGGGCTTCTCCATG | | GCGGGCTTCTCCATG | | | | |
| | GCCAC | | GCCAG | | | | |
| rs13785 | CACGGACGTCATCTG | 1433 | | | X | 154533634 | + |
| 2346 | AGTTGGTGGAGGCGG | | | | | | |
| | GCTTCTCCATGGCCA | | | | | | |
| | CCAGA | | | | | | |
| rs13785 | CACGGACGTCATCTG | 1434 | | | X | 154533634 | + |
| 2346 | AGTTGGTGGAGGCGG | | | | | | |
| | GCTTCTCCATGGCCA | | | | | | |
| | CCAGA | | | | | | |
| rs13785 | CACGGACGTCATCTG | 1435 | | | X | 154533634 | + |
| 2346 | AGTTGGTGGAGGCGG | | | | | | |
| | GCTTCTCCATGGCCA | | | | | | |
| | CCAGA | | | | | | |
| X_ | CTTTGGCACTGAGGG | 1436 | CTTTGGCACTGAGGG | 2126 | X | 154534036 | − |
| 154534036 | TCGCGGGGGCTATTT | | TCGCGGGGGCTATTT | | | | |
| | CGATGAATTTGGGAT | | CGATGAATTTGGGAT | | | | |
| | CATCG | | CATCC | | | | |
| X_ | CTTTGGCACTGAGGG | 1437 | CTTTGGCACTGAGGG | 2127 | X | 154534036 | − |
| 154534036 | TCGCGGGGGCTATTT | | TCGCGGGGGCTATTT | | | | |
| | CGATGAATTTGGGAT | | CGATGAATTTGGGAT | | | | |
| | CATCG | | CATCC | | | | |
| X_ | CTTTGGCACTGAGGG | 1438 | CTTTGGCACTGAGGG | 2128 | X | 154534036 | − |
| 154534036 | TCGCGGGGGCTATTT | | TCGCGGGGGCTATTT | | | | |
| | CGATGAATTTGGGAT | | CGATGAATTTGGGAT | | | | |
| | CATCG | | CATCC | | | | |
| X_ | GCTCTCACCGGATGA | 1439 | | | X | 154534075 | + |
| 154534075 | TCCCAAATTCATCGA | | | | | | |
| | AATAGCCCCCGCGAC | | | | | | |
| | CCTCA | | | | | | |
| X_ | GCTCTCACCGGATGA | 1440 | | | X | 154534075 | + |
| 154534075 | TCCCAAATTCATCGA | | | | | | |
| | AATAGCCCCCGCGAC | | | | | | |
| | CCTCA | | | | | | |
| X_ | GCTCTCACCGGATGA | 1441 | | | X | 154534075 | + |
| 154534075 | TCCCAAATTCATCGA | | | | | | |
| | AATAGCCCCCGCGAC | | | | | | |
| | CCTCA | | | | | | |
| X_ | TCCCAAATTCATCGA | 1442 | | | X | 154534092 | + |
| 154534092 | AATAGCCCCCGCGAC | | | | | | |
| | CCTCAGTGCCAAAGG | | | | | | |
| | GCTCC | | | | | | |
| X_ | TCCCAAATTCATCGA | 1443 | | | X | 154534092 | + |
| 154534092 | AATAGCCCCCGCGAC | | | | | | |
| | CCTCAGTGCCAAAGG | | | | | | |
| | GCTCC | | | | | | |
| X_ | TCCCAAATTCATCGA | 1444 | | | X | 154534092 | + |
| 154534092 | AATAGCCCCCGCGAC | | | | | | |
| | CCTCAGTGCCAAAGG | | | | | | |
| | GCTCC | | | | | | |
| rs78275 | ATCGAAATAGCCCCC | 1445 | | | X | 154534102 | + |
| 7170 | GCGACCCTCAGTGCC | | | | | | |
| | AAAGGGCTCCTTGAA | | | | | | |
| | GGTGA | | | | | | |
| rs78275 | ATCGAAATAGCCCCC | 1446 | | | X | 154534102 | + |
| 7170 | GCGACCCTCAGTGCC | | | | | | |
| | AAAGGGCTCCYTGAA | | | | | | |
| | GGTGA | | | | | | |
| rs78275 | ATCGAAATAGCCCCC | 1447 | | | X | 154534102 | + |
| 7170 | GCGACCCTCAGTGCC | | | | | | |
| | AAAGGGCTCCYTGAA | | | | | | |
| | GGTGA | | | | | | |
| X_ | AGCCCCCGCGACCCT | 1448 | | | X | 154534110 | + |
| 154534110 | CAGTGCCAAAGGGCT | | | | | | |
| | CCTTGAAGGTGAGGA | | | | | | |
| | TAACG | | | | | | |
| X_ | AGCCCCCGCGACCCT | 1449 | | | X | 154534110 | + |
| 154534110 | CAGTGCCAAAGGGCT | | | | | | |
| | CCTTGAAGGTGAGGA | | | | | | |
| | TAACG | | | | | | |
| X_ | AGCCCCCGCGACCCT | 1450 | | | X | 154534110 | + |
| 154534110 | CAGTGCCAAAGGGCT | | | | | | |
| | CCTTGAAGGTGAGGA | | | | | | |
| | TAACG | | | | | | |
| X_ | ACCCTCAGTGCCAAA | 1451 | | | X | 154534119 | + |
| 154534119 | GGGCTCCTTGAAGGT | | | | | | |
| | GARGATAACGYAGGC | | | | | | |
| | GATGT | | | | | | |
| X_ | ACCCTCAGTGCCAAA | 1452 | | | X | 154534119 | + |
| 154534119 | GGGCTCCTTGAAGGT | | | | | | |
| | GAGGATAACGCAGGC | | | | | | |
| | GATGT | | | | | | |
| X_ | ACCCTCAGTGCCAAA | 1453 | | | X | 154534119 | + |
| 154534119 | GGGCTCCTTGAAGGT | | | | | | |
| | GAGGATAACGCAGGC | | | | | | |
| | GATGT | | | | | | |
| rs13785 | AGTGCCAAAGGGCTC | 1454 | AGTGCCAAAGGGCTC | 2129 | X | 154534125 | + |
| 2328 | CTTGAAGGTGAGGAT | | CTTGAAGGTGAGGAT | | | | |
| | AACGCAGGCGATGTT | | AACGCAGGCGATGTT | | | | |
| | GTCCA | | GTCCC | | | | |
| rs13785 | AGTGCCAAAGGGCTC | 1455 | AGTGCCAAAGGGCTC | 2130 | X | 154534125 | + |
| 2328 | CTTGAAGGTGAGGAT | | CTTGAAGGTGAGGAT | | | | |
| | AACGCAGGCGATGTT | | AACGCAGGCGATGTT | | | | |
| | GTCCA | | GTCCC | | | | |
| rs13785 | AGTGCCAAAGGGCTC | 1456 | AGTGCCAAAGGGCTC | 2131 | X | 154534125 | + |
| 2328 | CTTGAAGGTGAGGAT | | CTTGAAGGTGAGGAT | | | | |
| | AACGCAGGCGATGTT | | AACGCAGGCGATGTT | | | | |
| | GTCCA | | GTCCC | | | | |
| X_ | TTGCCCCTCCCTGCA | 1457 | | | X | 154534126 | − |
| 154534126 | GATTTGCCAACAGGA | | | | | | |
| | TCTTCGGCCCCATCT | | | | | | |
| | GGAAC | | | | | | |
| X_ | AGTGCCAAAGGGCTC | 1458 | | | X | 154534126 | + |
| 154534126 | CTTGAAGGTGAGGAT | | | | | | |
| | AACGCAGGCGATGTT | | | | | | |
| | GTCCC | | | | | | |
| X_ | AGTGCCAAAGGGCTC | 1459 | | | X | 154534126 | + |
| 154534126 | CTTGAAGGTGAGGAT | | | | | | |
| | AACGCAGGCGATGTT | | | | | | |
| | GTCCC | | | | | | |
| rs13785 | CGCAGGCGATGTTGT | 1460 | CGCAGGCGATGTTGT | 2132 | X | 154534157 | + |
| 2319 | CCCGGTTCCAGATGG | | CCCGGTTCCAGATGG | | | | |
| | GGCCGAAGATCCTGT | | GGCCGAAGATCCTGT | | | | |
| | TGGCA | | TGGCC | | | | |
| rs13785 | CGCAGGCGATGTTGT | 1461 | CGCAGGCGATGTTGT | 2133 | X | 154534157 | + |
| 2319 | CCCGGTTCCAGATGG | | CCCGGTTCCAGATGG | | | | |
| | GGCCGAAGATCCTGT | | GGCCGAAGATCCTGT | | | | |
| | TGGCA | | TGGCC | | | | |
| rs13785 | CGCAGGCGATGTTGT | 1462 | CGCAGGCGATGTTGT | 2134 | X | 154534157 | + |
| 2319 | CCCGGTTCCAGATGG | | CCCGGTTCCAGATGG | | | | |
| | GGCCGAAGATCCTGT | | GGCCGAAGATCCTGT | | | | |
| | TGGCA | | TGGCC | | | | |
| rs13785 | CTACCGCATCGACCA | 1463 | CTACCGCATCGACCA | 2135 | X | 154534345 | − |
| 2326 | CTACCTGGGCAAGGA | | CTACCTGGGCAAGGA | | | | |
| | GATGGTGCAGAACCT | | GATGGTGCAGAACCT | | | | |
| | CRTGT | | CRTGG | | | | |
| rs13785 | CTACCGCATCGACCA | 1464 | CTACCGCATCGACCA | 2136 | X | 154534345 | − |
| 2326 | CTACCTGGGCAAGGA | | CTACCTGGGCAAGGA | | | | |
| | GATGGTGCAGAACCT | | GATGGTGCAGAACCT | | | | |
| | CATGT | | CATGG | | | | |
| rs13785 | CTACCGCATCGACCA | 1465 | CTACCGCATCGACCA | 2137 | X | 154534345 | − |
| 2326 | CTACCTGGGCAAGGA | | CTACCTGGGCAAGGA | | | | |
| | GATGGTGCAGAACCT | | GATGGTGCAGAACCT | | | | |
| | CATGT | | CATGG | | | | |
| rs78275 | AGATCTACCGCATCG | 1466 | | | X | 154534348 | − |
| 4619 | ACCACTACCTGGGCA | | | | | | |
| | AGGAGATGGTGCAGA | | | | | | |
| | ACCTC | | | | | | |
| rs78275 | AGATCTACCGCATCG | 1467 | | | X | 154534348 | − |
| 4619 | ACCACTACCTGGGCA | | | | | | |
| | AGGAGATGGTGCAGA | | | | | | |
| | ACCTC | | | | | | |
| rs78275 | AGATCTACCGCATCG | 1468 | | | X | 154534348 | − |
| 4619 | ACCACTACCTGGGCA | | | | | | |
| | AGGAGATGGTGCAGA | | | | | | |
| | ACCTC | | | | | | |
| rs78186 | CCTCAGCACCATGAG | 1469 | | | X | 154534387 | + |
| 5768 | GTTCTGCACCATCTC | | | | | | |
| | CTTGCCCAGGTAGTG | | | | | | |
| | GTCGA | | | | | | |
| rs78186 | CCTCAGCACCATGAG | 1470 | | | X | 154534387 | + |
| 5768 | GTTCTGCACCATCTC | | | | | | |
| | CTTGCCCAGGTAGTG | | | | | | |
| | GTCGA | | | | | | |
| rs78186 | GGCTGTCCAACCACA | 1471 | | | X | 154534387 | − |
| 5768 | TCTCCTCCCTGTTCC | | | | | | |
| | GTGAGGACCAGATCT | | | | | | |
| | ACCGC | | | | | | |
| rs13785 | CAGCACCATGAGGTT | 1472 | CAGCACCATGAGGTT | 2138 | X | 154534389 | + |
| 2332 | CTGCACCATCTCCTT | | CTGCACCATCTCCTT | | | | |
| | GCCCAGGTAGTGGTC | | GCCCAGGTAGTGGTC | | | | |
| | GAYGG | | GAYGC | | | | |
| rs13785 | CAGCACCATGAGGTT | 1473 | CAGCACCATGAGGTT | 2139 | X | 154534389 | + |
| 2332 | CTGCACCATCTCCTT | | CTGCACCATCTCCTT | | | | |
| | GCCCAGGTAGTGGTC | | GCCCAGGTAGTGGTC | | | | |
| | GAYGG | | GAYGC | | | | |
| rs13785 | CAGCACCATGAGGTT | 1474 | CAGCACCATGAGGTT | 2140 | X | 154534389 | + |
| 2332 | CTGCACCATCTCCTT | | CTGCACCATCTCCTT | | | | |
| | GCCCAGGTAGTGGTC | | GCCCAGGTAGTGGTC | | | | |
| | GAYGG | | GAYGC | | | | |
| rs13785 | AGCACCATGAGGTTC | 1475 | AGCACCATGAGGTTC | 2141 | X | 154534390 | + |
| 2330 | TGCACCATCTCCTTG | | TGCACCATCTCCTTG | | | | |
| | CCCAGGTAGTGGTCG | | CCCAGGTAGTGGTCG | | | | |
| | AYGCA | | AYGCG | | | | |
| rs13785 | CAGCACCATGAGGTT | 1476 | | | X | 154534390 | + |
| 2330 | CTGCACCATCTCCTT | | | | | | |
| | GCCCAGGTAGTGGTC | | | | | | |
| | GATGC | | | | | | |
| rs13785 | CAGCACCATGAGGTT | 1477 | | | X | 154534390 | + |
| 2330 | CTGCACCATCTCCTT | | | | | | |
| | GCCCAGGTAGTGGTC | | | | | | |
| | GATGC | | | | | | |
| X_ | CCATCTCCTTGCCCA | 1478 | CCATCTCCTTGCCCA | 2142 | X | 154534409 | + |
| 154534409 | GGTAGTGGTCGAYGB | | GGTAGTGGTCGAYGB | | | | |
| | RGTAGATCTGGTCCT | | RGTAGATCTGGTCCT | | | | |
| | CACGC | | CACGG | | | | |
| X_ | CCATCTCCTTGCCCA | 1479 | CCATCTCCTTGCCCA | 2143 | X | 154534409 | + |
| 154534409 | GGTAGTGGTCGAYGB | | GGTAGTGGTCGAYGB | | | | |
| | RGTAGATCTGGTCCT | | RGTAGATCTGGTCCT | | | | |
| | CACGC | | CACGG | | | | |
| X_ | CCATCTCCTTGCCCA | 1480 | CCATCTCCTTGCCCA | 2144 | X | 154534409 | + |
| 154534409 | GGTAGTGGTCGATGC | | GGTAGTGGTCGATGC | | | | |
| | GGTAGATCTGGTCCT | | GGTAGATCTGGTCCT | | | | |
| | CACGC | | CACGG | | | | |
| X_ | CCCAGGTAGTGGTCG | 1481 | CCCAGGTAGTGGTCG | 2145 | X | 154534418 | + |
| 154534418 | ATGCGGTAGATCTGG | | ATGCGGTAGATCTGG | | | | |
| | TCCTCACGSAACAGG | | TCCTCACGSAACAGG | | | | |
| | GAGGA | | GAGAT | | | | |
| X_ | CCCAGGTAGTGGTCG | 1482 | CCCAGGTAGTGGTCG | 2146 | X | 154534418 | + |
| 154534418 | ATGCGGTAGATCTGG | | ATGCGGTAGATCTGG | | | | |
| | TCCTCACGGAACAGG | | TCCTCACGGAACAGG | | | | |
| | GAGGA | | GAGAT | | | | |
| X_ | CCCAGGTAGTGGTCG | 1483 | CCCAGGTAGTGGTCG | 2147 | X | 154534418 | + |
| 154534418 | ATGCGGTAGATCTGG | | ATGCGGTAGATCTGG | | | | |
| | TCCTCACGGAACAGG | | TCCTCACGGAACAGG | | | | |
| | GAGGA | | GAGAT | | | | |
| rs50308 | TGCCCAGGTAGTGGT | 1484 | | | X | 154534419 | + |
| 68 | CGATGCGGTAGATCT | | | | | | |
| | GGTCCTCACGGAACA | | | | | | |
| | GGGAG | | | | | | |
| rs26760 | GCGGTAGATCTGGTC | 1485 | | | X | 154534438 | + |
| 6836 | CTCACGGAACAGGGA | | | | | | |
| | GRAGATGTGGTTGGA | | | | | | |
| | CAGCC | | | | | | |
| rs26760 | GCGGTAGATCTGGTC | 1486 | | | X | 154534438 | + |
| 6836 | CTCACGGAACAGGGA | | | | | | |
| | GRAGATGTGGTTGGA | | | | | | |
| | CAGCC | | | | | | |
| rs26760 | GCGGTAGATCTGGTC | 1487 | | | X | 154534438 | + |
| 6836 | CTCACGGAACAGGGA | | | | | | |
| | GGAGATGTGGTTGGA | | | | | | |
| | CAGCC | | | | | | |
| rs50308 | GTAGATCTGGTCCTC | 1488 | GTAGATCTGGTCCTC | 2148 | X | 154534440 | + |
| 72 | ACGGAACAGGGAGGA | | ACGGAACAGGGAGGA | | | | |
| | GATGTGGTTGGACAG | | GATGTGGTTGGACAG | | | | |
| | CCGGT | | CCGGA | | | | |
| rs50308 | GTAGATCTGGTCCTC | 1489 | GTAGATCTGGTCCTC | 2149 | X | 154534440 | + |
| 72 | ACGGAACAGGGAGRA | | ACGGAACAGGGAGRA | | | | |
| | GATGTGGTTGGACAG | | GATGTGGTTGGACAG | | | | |
| | CCRGA | | CCRGT | | | | |
| rs50308 | GTAGATCTGGTCCTC | 1490 | GTAGATCTGGTCCTC | 2150 | X | 154534440 | + |
| 72 | ACGGAACAGGGAGGA | | ACGGAACAGGGAGGA | | | | |
| | GATGTGGTTGGACAG | | GATGTGGTTGGACAG | | | | |
| | CCGGA | | CCGGT | | | | |
| X_ | TGGTCCTCACGGAAC | 1491 | TGGTCCTCACGGAAC | 2151 | X | 154534447 | + |
| 154534447 | AGGGAGGAGATGTGG | | AGGGAGGAGATGTGG | | | | |
| | TTGGACAGCCRGWCA | | TTGGACAGCCRGWCA | | | | |
| | GAGCT | | GAGCA | | | | |
| X_ | TGGTCCTCACGGAAC | 1492 | TGGTCCTCACGGAAC | 2152 | X | 154534447 | + |
| 154534447 | AGGGAGGAGATGTGG | | AGGGAGGAGATGTGG | | | | |
| | TTGGACAGCCRGWCA | | TTGGACAGCCRGWCA | | | | |
| | GAGCT | | GAGCA | | | | |
| X_ | TGGTCCTCACGGAAC | 1493 | TGGTCCTCACGGAAC | 2153 | X | 154534447 | + |
| 154534447 | AGGGAGGAGATGTGG | | AGGGAGGAGATGTGG | | | | |
| | TTGGACAGCCRGWCA | | TTGGACAGCCRGWCA | | | | |
| | GAGCT | | GAGCA | | | | |
| X_ | TGGTCCTCACGGAAC | 1494 | TGGTCCTCACGGAAC | 2154 | X | 154534447 | + |
| 154534447 | AGGGAGGAGATGTGG | | AGGGAGGAGATGTGG | | | | |
| | TTGGACAGCCRGWCA | | TTGGACAGCCRGWCA | | | | |
| | GAGCT | | GAGCA | | | | |
| X_ | CACGGAACAGGGAGG | 1495 | | | X | 154534455 | + |
| 154534455 | AGATGTGGTTGGACA | | | | | | |
| | GCCGGTCAGAGCTCT | | | | | | |
| | GCAGG | | | | | | |
| X_ | CACGGAACAGGGAGG | 1496 | | | X | 154534455 | + |
| 154534455 | AGATGTGGTTGGACA | | | | | | |
| | GCCGGTCAGAGCTCT | | | | | | |
| | GCAGG | | | | | | |
| X_ | CACGGAACAGGGAGG | 1497 | | | X | 154534455 | + |
| 154534455 | AGATGTGGTTGGACA | | | | | | |
| | GCCGGTCAGAGCTCT | | | | | | |
| | GCAGG | | | | | | |
| X_ | GGGAGGAGATGTGGT | 1498 | GGGAGGAGATGTGGT | 2155 | X | 154534463 | + |
| 154534463 | TGGACAGCCGGTCAG | | TGGACAGCCGGTCAG | | | | |
| | AGCTCTGCAGGTCCC | | AGCTCTGCAGGTCCC | | | | |
| | TCCCC | | TCCCG | | | | |
| X_ | GGGAGGAGATGTGGT | 1499 | GGGAGGAGATGTGGT | 2156 | X | 154534463 | + |
| 154534463 | TGGACAGCCGGTCAG | | TGGACAGCCGGTCAG | | | | |
| | AGCTCTGCAGGTCCC | | AGCTCTGCAGGTCCC | | | | |
| | TCCCC | | TCCCG | | | | |
| X_ | GGGAGGAGATGTGGT | 1500 | GGGAGGAGATGTGGT | 2157 | X | 154534463 | + |
| 154534463 | TGGACAGCCGGTCAG | | TGGACAGCCGGTCAG | | | | |
| | AGCTCTGCAGGTCCC | | AGCTCTGCAGGTCCC | | | | |
| | TCCCC | | TCCCG | | | | |
| X_ | CTCCGGGCTCCCAGC | 1501 | | | X | 154534463 | − |
| 154534463 | AGAGGCTGGAACCGC | | | | | | |
| | ATCATCGTGGAGAAG | | | | | | |
| | CCCTT | | | | | | |
| rs13785 | GGAGGAGATGTGGTT | 1502 | | | X | 154534465 | + |
| 2343 | GGACAGCCGGTCAGA | | | | | | |
| | GCTCTGCAGGTCCCT | | | | | | |
| | CCCGA | | | | | | |
| rs13785 | GGAGGAGATGTGGTT | 1503 | | | X | 154534465 | + |
| 2343 | GGACAGCCGGTCAGA | | | | | | |
| | GCTCTGCAGGTCCCT | | | | | | |
| | CCCGA | | | | | | |
| rs13785 | GGAGGAGATGTGGTT | 1504 | | | X | 154534465 | + |
| 2343 | GGACAGCCGGTCAGA | | | | | | |
| | GCTCTGCAGGTCCCT | | | | | | |
| | CCCGA | | | | | | |
| X_ | GGAGATGTGGTTGGA | 1505 | | | X | 154534468 | + |
| 154534468 | CAGCCGGTCAGAGCT | | | | | | |
| | CTGCAGGYCCCTCCC | | | | | | |
| | SARGG | | | | | | |
| X_ | GGAGATGTGGTTGGA | 1506 | | | X | 154534468 | + |
| 154534468 | CAGCCGGTCAGAGCT | | | | | | |
| | CTGCAGGTCCCTCCC | | | | | | |
| | GAAGG | | | | | | |
| X_ | GGAGATGTGGTTGGA | 1507 | | | X | 154534468 | + |
| 154534468 | CAGCCGGTCAGAGCT | | | | | | |
| | CTGCAGGTCCCTCCC | | | | | | |
| | GAAGG | | | | | | |
| X_ | GCCGGTCAGAGCTCT | 1508 | | | X | 154534485 | + |
| 154534485 | GCAGGTCCCTCCCSA | | | | | | |
| | RGGRCTTCTCCACGA | | | | | | |
| | TGATG | | | | | | |
| X_ | GCCGGTCAGAGCTCT | 1509 | | | X | 154534485 | + |
| 154534485 | GCAGGTCCCTCCCSA | | | | | | |
| | RGGRCTTCTCCACGA | | | | | | |
| | TGATG | | | | | | |
| X_ | GCCGGTCAGAGCTCT | 1510 | | | X | 154534485 | + |
| 154534485 | GCAGGTCCCTCCCSA | | | | | | |
| | RGGRCTTCTCCACGA | | | | | | |
| | TGATG | | | | | | |
| X_ | CCGGTCAGAGCTCTG | 1511 | | | X | 154534486 | + |
| 154534486 | CAGGTCCCTCCCSAR | | | | | | |
| | GGRCTTCTCCACGAT | | | | | | |
| | GATGC | | | | | | |
| X_ | CCGGTCAGAGCTCTG | 1512 | | | X | 154534486 | + |
| 154534486 | CAGGTCCCTCCCSAR | | | | | | |
| | GGRCTTCTCCACGAT | | | | | | |
| | GATGC | | | | | | |
| X_ | CCGGTCAGAGCTCTG | 1513 | | | X | 154534486 | + |
| 154534486 | CAGGTCCCTCCCGAA | | | | | | |
| | GGGCTTCTCCACGAT | | | | | | |
| | GATGC | | | | | | |
| X_ | CCGGTCAGAGCTCTG | 1514 | | | X | 154534486 | + |
| 154534486 | CAGGTCCCTCCCGAA | | | | | | |
| | GGGCTTCTCCACGAT | | | | | | |
| | GATGC | | | | | | |
| rs13785 | GTCAGAGCTCTGCAG | 1515 | | | X | 154534489 | + |
| 2331 | GTCCCTCCCGAAGGG | | | | | | |
| | CTTCTCCACGATGAT | | | | | | |
| | GCGGT | | | | | | |
| rs13785 | GTCAGAGCTCTGCAG | 1516 | | | X | 154534489 | + |
| 2331 | GTCCCTCCCGAAGGG | | | | | | |
| | CTTCTCCACGATGAT | | | | | | |
| | GCGGT | | | | | | |
| rs13785 | GTCAGAGCTCTGCAG | 1517 | | | X | 154534489 | + |
| 2331 | GTCCCTCCCGAAGGG | | | | | | |
| | CTTCTCCACGATGAT | | | | | | |
| | GCGGT | | | | | | |
| X_ | AGCTCTGCAGGTCCC | 1518 | | | X | 154534494 | + |
| 154534494 | TCCCGAAGGGCTTCT | | | | | | |
| | CCACGATGATGCGGT | | | | | | |
| | TCCAG | | | | | | |
| X_ | CCCCGAAGAGGGGTT | 1519 | | | X | 154534494 | − |
| 154534494 | CAAGGGGGTAACGCA | | | | | | |
| | GCTCCGGGCTCCCAG | | | | | | |
| | CAGAR | | | | | | |
| X_ | CCCCGAAGAGGGGTT | 1520 | | | X | 154534494 | − |
| 154534494 | CAAGGGGGTAACGCA | | | | | | |
| | GCTCCGGGCTCCCAG | | | | | | |
| | CAGAR | | | | | | |
| rs13785 | GCTCTGCAGGTCCCT | 1521 | | | X | 154534495 | + |
| 2314 | CCCGAAGGGCTTCTC | | | | | | |
| | CACGATGATGCGGTT | | | | | | |
| | CCAGC | | | | | | |
| rs13785 | GCTCTGCAGGTCCCT | 1522 | | | X | 154534495 | + |
| 2314 | CCCGAAGGGCTTCTC | | | | | | |
| | CACGATGATGCGGTT | | | | | | |
| | CCAGC | | | | | | |
| rs13785 | GCTCTGCAGGTCCCT | 1523 | | | X | 154534495 | + |
| 2314 | CCCGAAGGGCTTCTC | | | | | | |
| | CACGATGATGCGGTT | | | | | | |
| | CCAGC | | | | | | |
| rs13785 | GCTCTGCAGGTCCCT | 1524 | | | X | 154534495 | + |
| 2314 | CCCGAAGGGCTTCTC | | | | | | |
| | CACGATGATGCGGTT | | | | | | |
| | CCAGC | | | | | | |
| rs37091 | CCCCGACCGTCTACG | 1525 | CCCCGACCGTCTACG | 2158 | X | 154535176 | − |
| 8918 | AGGCCGTCACCAAGA | | AGGCCGTCACCAAGA | | | | |
| | ACATTCACGAGTCCT | | ACATTCACGAGTCCT | | | | |
| | GCATC | | GCATG | | | | |
| rs37091 | CCCCGACCGTCTACG | 1526 | CCCCGACCGTCTACG | 2159 | X | 154535176 | − |
| 8918 | AGGCCGTCACCAAGA | | AGGCCGTCACCAAGA | | | | |
| | ACATTCACGAGTCCT | | ACATTCACGAGTCCT | | | | |
| | GCATC | | GCATG | | | | |
| rs37091 | CCCCGACCGTCTACG | 1527 | CCCCGACCGTCTACG | 2160 | X | 154535176 | − |
| 8918 | AGGCCGTCACCAAGA | | AGGCCGTCACCAAGA | | | | |
| | ACATTCACGAGTCCT | | ACATTCACGAGTCCT | | | | |
| | GCATC | | GCATG | | | | |
| rs78248 | CTTGCCCCCGACCGT | 1528 | | | X | 154535180 | − |
| 7723 | CTACGAGGCCGTCAC | | | | | | |
| | CAAGAACATTCACGA | | | | | | |
| | GTCCT | | | | | | |
| rs78248 | CCTGGCAGGCGGGAA | 1529 | | | X | 154535180 | + |
| 7723 | GGGAGGGCAACGGCA | | | | | | |
| | AGCCTTACATCTGGC | | | | | | |
| | TCATG | | | | | | |
| rs78248 | CCTGGCAGGCGGGAA | 1530 | | | X | 154535180 | + |
| 7723 | GGGAGGGCAACGGCA | | | | | | |
| | AGCCTTACATCTGGC | | | | | | |
| | TCATG | | | | | | |
| rs13785 | ACCTGGCCTTGCCCC | 1531 | | | X | 154535187 | − |
| 2313 | CGACCGTCTACRAGG | | | | | | |
| | CCGTCACCAAGAACA | | | | | | |
| | TTSAC | | | | | | |
| rs13785 | ACCTGGCCTTGCCCC | 1532 | | | X | 154535187 | − |
| 2313 | CGACCGTCTACGAGG | | | | | | |
| | CCGTCACCAAGAACA | | | | | | |
| | TTCAC | | | | | | |
| rs13785 | GGCGGGAAGGGAGGG | 1533 | | | X | 154535187 | + |
| 2313 | CAACGGCAAGCCTTA | | | | | | |
| | CATCTGGCTCATGCA | | | | | | |
| | GGACT | | | | | | |
| X_ | CTACCTGGCCTTGCC | 1534 | CTACCTGGCCTTGCC | 2161 | X | 154535190 | − |
| 154535190 | CCCGACCGTCTACRA | | CCCGACCGTCTACRA | | | | |
| | GGCCGTCACCAAGAA | | GGCCGTCACCAAGAA | | | | |
| | CATTG | | CATTC | | | | |
| X_ | CTACCTGGCCTTGCC | 1535 | CTACCTGGCCTTGCC | 2162 | X | 154535190 | − |
| 154535190 | CCCGACCGTCTACRA | | CCCGACCGTCTACRA | | | | |
| | GGCCGTCACCAAGAA | | GGCCGTCACCAAGAA | | | | |
| | CATTG | | CATTC | | | | |
| X_ | CTACCTGGCCTTGCC | 1536 | CTACCTGGCCTTGCC | 2163 | X | 154535190 | − |
| 154535190 | CCCGACCGTCTACRA | | CCCGACCGTCTACRA | | | | |
| | GGCCGTCACCAAGAA | | GGCCGTCACCAAGAA | | | | |
| | CATTG | | CATTC | | | | |
| X_ | GCCTTACATCTGGCT | 1537 | | | X | 154535211 | + |
| 154535211 | CATGCAGGACTCGTG | | | | | | |
| | AATGTTCTTGGTGAC | | | | | | |
| | GGCCT | | | | | | |
| X_ | GCCTTACATCTGGCT | 1538 | | | X | 154535211 | + |
| 154535211 | CATGCAGGACTCGTG | | | | | | |
| | AATGTTCTTGGTGAC | | | | | | |
| | GGCCT | | | | | | |
| X_ | GCCTTACATCTGGCT | 1539 | | | X | 154535211 | + |
| 154535211 | CATGCAGGACTCGTG | | | | | | |
| | AATGTTCTTGGTGAC | | | | | | |
| | GGCCT | | | | | | |
| X_ | GTTCTTGGTGACGGC | 1540 | | | X | 154535244 | + |
| 154535244 | CTCGTAGACGGTCGG | | | | | | |
| | GGGCAAGGCCAGGTA | | | | | | |
| | GAAGA | | | | | | |
| X_ | GTTCTTGGTGACGGC | 1541 | | | X | 154535244 | + |
| 154535244 | CTCGTAGACGGTCGG | | | | | | |
| | GGGCAAGGCCAGGTA | | | | | | |
| | GAAGA | | | | | | |
| X_ | GCCTCAACAGCCACA | 1542 | | | X | 154535244 | − |
| 154535244 | TGAATGCCCTCCACC | | | | | | |
| | TGGGGTCACAGGCCA | | | | | | |
| | ACCGC | | | | | | |
| X_ | AGCGCCTCAACAGCC | 1543 | | | X | 154535247 | − |
| 154535247 | ACATGAATGCCCTCC | | | | | | |
| | ACCTGGGGTCACAGG | | | | | | |
| | CCAAC | | | | | | |
| X_ | AGCGCCTCAACAGCC | 1544 | | | X | 154535247 | − |
| 154535247 | ACATGAATGCCCTCC | | | | | | |
| | ACCTGGGGTCACAGG | | | | | | |
| | CCAAC | | | | | | |
| X_ | AGCGCCTCAACAGCC | 1545 | | | X | 154535247 | − |
| 154535247 | ACATGAATGCCCTCC | | | | | | |
| | ACCTGGGGTCACAGG | | | | | | |
| | CCAAC | | | | | | |
| rs78232 | CCAGCGCCTCAACAG | 1546 | | | X | 154535249 | − |
| 2505 | CCACATGAATGCCCT | | | | | | |
| | CCACCTGGGGTCACA | | | | | | |
| | GGCCA | | | | | | |
| rs78232 | CCAGCGCCTCAACAG | 1547 | | | X | 154535249 | − |
| 2505 | CCACATGAATGCCCT | | | | | | |
| | CCACCTGGGGTCACA | | | | | | |
| | GGCCA | | | | | | |
| rs78232 | CCAGCGCCTCAACAG | 1548 | | | X | 154535249 | − |
| 2505 | CCACATGAATGCCCT | | | | | | |
| | CCACCTGGGGTCACA | | | | | | |
| | GGCCA | | | | | | |
| rs13785 | GTAGACGGTCGGGGG | 1549 | GTAGACGGTCGGGGG | 2164 | X | 154535261 | + |
| 2341 | CAAGGCCAGGTAGAA | | CAAGGCCAGGTAGAA | | | | |
| | GARGCRGKTGGCCTG | | GARGCRGKTGGCCTG | | | | |
| | TGACA | | TGACC | | | | |
| rs13785 | GTAGACGGTCGGGGG | 1550 | GTAGACGGTCGGGGG | 2165 | X | 154535261 | + |
| 2341 | CAAGGCCAGGTAGAA | | CAAGGCCAGGTAGAA | | | | |
| | GARGCRGKTGGCCTG | | GARGCRGKTGGCCTG | | | | |
| | TGACA | | TGACC | | | | |
| rs13785 | GTAGACGGTCGGGGG | 1551 | GTAGACGGTCGGGGG | 2166 | X | 154535261 | + |
| 2341 | CAAGGCCAGGTAGAA | | CAAGGCCAGGTAGAA | | | | |
| | GARGCRGKTGGCCTG | | GARGCRGKTGGCCTG | | | | |
| | TGACA | | TGACC | | | | |
| X_ | GTCGGGGGCAAGGCC | 1552 | | | X | 154535269 | + |
| 154535269 | AGGTAGAAGAGGCGG | | | | | | |
| | TTGGCCTGTGACCCC | | | | | | |
| | AGGTG | | | | | | |
| X_ | GTCGGGGGCAAGGCC | 1553 | | | X | 154535269 | + |
| 154535269 | AGGTAGAAGAGGCGG | | | | | | |
| | TTGGCCTGTGACCCC | | | | | | |
| | AGGTG | | | | | | |
| X_ | GTCGGGGGCAAGGCC | 1554 | | | X | 154535269 | + |
| 154535269 | AGGTAGAAGAGGCGG | | | | | | |
| | TTGGCCTGTGACCCC | | | | | | |
| | AGGTG | | | | | | |
| rs78365 | CGGGGGCAAGGCCAG | 1555 | CGGGGGCAAGGCCAG | 2167 | X | 154535270 | + |
| 220 | GTAGAAGAGGCGGTT | | GTAGAAGAGGCGGTT | | | | |
| | GGCCTGTGACCCCAG | | GGCCTGTGACCCCAG | | | | |
| | GTGGA | | GTGGC | | | | |
| rs78365 | GTACGATGATGCAGC | 1556 | | | X | 154535270 | − |
| 220 | CTCCTACCAGCGCCT | | | | | | |
| | CAACAGCCACATGAA | | | | | | |
| | TGCCC | | | | | | |
| rs78365 | GTACGATGATGCAGC | 1557 | | | X | 154535270 | − |
| 220 | CTCCTACCAGCGCCT | | | | | | |
| | CAACAGCCACATGAA | | | | | | |
| | TGCCC | | | | | | |
| X_ | GGCAAGGCCAGGTAG | 1558 | GGCAAGGCCAGGTAG | 2168 | X | 154535274 | + |
| 154535274 | AAGAGGCGGTTGGCC | | AAGAGGCGGTTGGCC | | | | |
| | TGTGACCCCAGGTGG | | TGTGACCCCAGGTGG | | | | |
| | AGGGA | | AGGGC | | | | |
| X_ | GCCAGTACGATGATG | 1559 | | | X | 154535274 | − |
| 154535274 | CAGCCTCCTACCAGC | | | | | | |
| | GCCTCAACAGCCACA | | | | | | |
| | TKRAT | | | | | | |
| X_ | CCAGTACGATGATGC | 1560 | CCAGTACGATGATGC | 2169 | X | 154535274 | − |
| 154535274 | AGCCTCCTACCAGCG | | AGCCTCCTACCAGCG | | | | |
| | CCTCAACAGCCACAT | | CCTCAACAGCCACAT | | | | |
| | KRATT | | KRATG | | | | |
| rs10508 | TGGCCAGTACGATGA | 1561 | TGGCCAGTACGATGA | 2170 | X | 154535277 | − |
| 29 | TGCAGCCTCCYACCA | | TGCAGCCTCCYACCA | | | | |
| | GCGCCTCAACAGCCA | | GCGCCTCAACAGCCA | | | | |
| | CATKA | | CATKG | | | | |
| rs10508 | CAAGGCCAGGTAGAA | 1562 | | | X | 154535277 | + |
| 29 | GAGGCGGTTGGCCTG | | | | | | |
| | TGACCCCAGGTGGAG | | | | | | |
| | GGCAT | | | | | | |
| rs10508 | AAGGCCAGGTAGAAG | 1563 | AAGGCCAGGTAGAAG | 2171 | X | 154535277 | + |
| 29 | AGGCGGTTGGCCTGT | | AGGCGGTTGGCCTGT | | | | |
| | GACCCCAGGTGGAGG | | GACCCCAGGTGGAGG | | | | |
| | GCATT | | GCATC | | | | |
| X_ | GCTGGCCAGTACGAT | 1564 | | | X | 154535278 | − |
| 154535278 | GATGCAGCCTCCYAC | | | | | | |
| | CAGCGCCTCAACAGC | | | | | | |
| | CACAT | | | | | | |
| X_ | GCTGGCCAGTACGAT | 1565 | | | X | 154535278 | − |
| 154535278 | GATGCAGCCTCCYAC | | | | | | |
| | CAGCGCCTCAACAGC | | | | | | |
| | CACAT | | | | | | |
| X_ | GCTGGCCAGTACGAT | 1566 | | | X | 154535278 | − |
| 154535278 | GATGCAGCCTCCYAC | | | | | | |
| | CAGCGCCTCAACAGC | | | | | | |
| | CACAT | | | | | | |
| X_ | GGCCTGTGACCCCAG | 1567 | | | X | 154535301 | + |
| 154535301 | GTGGAGGGCATTCAT | | | | | | |
| | GTGGCTGTTGAGGCG | | | | | | |
| | CTGGT | | | | | | |
| X_ | GGCCTGTGACCCCAG | 1568 | | | X | 154535301 | + |
| 154535301 | GTGGAGGGCATTCAT | | | | | | |
| | GTGGCTGTTGAGGCG | | | | | | |
| | CTGGT | | | | | | |
| X_ | GGCCTGTGACCCCAG | 1569 | | | X | 154535301 | + |
| 154535301 | GTGGAGGGCATTCAT | | | | | | |
| | GTGGCTGTTGAGGCG | | | | | | |
| | CTGGT | | | | | | |
| rs50308 | TCAAGCTGGAGGACT | 1570 | | | X | 154535316 | − |
| 70 | TCTTTGCCCGCAACT | | | | | | |
| | CCTATGTGGCTGGCC | | | | | | |
| | AGTAC | | | | | | |
| rs50308 | TCAAGCTGGAGGACT | 1571 | | | X | 154535316 | − |
| 70 | TCTTTGCCCGCAACT | | | | | | |
| | CCTATGTGGCTGGCC | | | | | | |
| | AGTAC | | | | | | |
| rs50308 | TCAAGCTGGAGGACT | 1572 | | | X | 154535316 | − |
| 70 | TCTTTGCCCGCAACT | | | | | | |
| | CCTATGTGGCTGGCC | | | | | | |
| | AGTAC | | | | | | |
| X_ | GTGGCTGTTGAGGCG | 1573 | GTGGCTGTTGAGGCG | 2172 | X | 154535330 | + |
| 154535330 | CTGGTAGGAGGCTGC | | CTGGTAGGAGGCTGC | | | | |
| | ATCATCGTACTGGCC | | ATCATCGTACTGGCC | | | | |
| | AGCCA | | AGCCT | | | | |
| X_ | GTGGCTGTTGAGGCG | 1574 | GTGGCTGTTGAGGCG | 2173 | X | 154535330 | + |
| 154535330 | CTGGTAGGAGGCTGC | | CTGGTAGGAGGCTGC | | | | |
| | ATCATYGTACTGGCC | | ATCATYGTACTGGCC | | | | |
| | AGCCA | | AGCCT | | | | |
| X_ | GTGGCTGTTGAGGCG | 1575 | GTGGCTGTTGAGGCG | 2174 | X | 154535330 | + |
| 154535330 | CTGGTAGGAGGCTGC | | CTGGTAGGAGGCTGC | | | | |
| | ATCATYGTACTGGCC | | ATCATYGTACTGGCC | | | | |
| | AGCCA | | AGCCT | | | | |
| X_ | GTGGCTGTTGAGGCG | 1576 | GTGGCTGTTGAGGCG | 2175 | X | 154535330 | + |
| 154535330 | CTGGTAGGAGGCTGC | | CTGGTAGGAGGCTGC | | | | |
| | ATCATCGTACTGGCC | | ATCATCGTACTGGCC | | | | |
| | AGCCA | | AGCCT | | | | |
| rs26760 | GCCACCCCAGAGGAG | 1577 | GCCACCCCAGAGGAG | 2176 | X | 154535336 | − |
| 6835 | AAGCTCAAGCTGGAG | | AAGCTCAAGCTGGAG | | | | |
| | GACTTCTTTGCCCRC | | GACTTCTTTGCCCRC | | | | |
| | AACTG | | AACTC | | | | |
| rs26760 | GTTGAGGCGCTGGTA | 1578 | GTTGAGGCGCTGGTA | 2177 | X | 154535336 | + |
| 6835 | GGAGGCTGCATCATC | | GGAGGCTGCATCATC | | | | |
| | GTACTGGCCAGCCAC | | GTACTGGCCAGCCAC | | | | |
| | ATAGC | | ATAGG | | | | |
| rs26760 | GCCACCCCAGAGGAG | 1579 | GCCACCCCAGAGGAG | 2178 | X | 154535336 | − |
| 6835 | AAGCTCAAGCTGGAG | | AAGCTCAAGCTGGAG | | | | |
| | GACTTCTTTGCCCGC | | GACTTCTTTGCCCGC | | | | |
| | AACTC | | AACTG | | | | |
| rs18127 | GGCGCTGGTAGGAGG | 1580 | | | X | 154535342 | + |
| 7621 | CTGCATCATCGTACT | | | | | | |
| | GGCCAGCCACATAGG | | | | | | |
| | AGTTG | | | | | | |
| rs18127 | CTCCCAGGCCACCCC | 1581 | | | X | 154535342 | − |
| 7621 | AGAGGAGAAGCTCAA | | | | | | |
| | GCTGGAGGACTTCTT | | | | | | |
| | TGCCC | | | | | | |
| rs18127 | CTCCCAGGCCACCCC | 1582 | | | X | 154535342 | − |
| 7621 | AGAGGAGAAGCTCAA | | | | | | |
| | GCTGGAGGACTTCTT | | | | | | |
| | TGCCC | | | | | | |
| X_ | CTGGCCAGCCACATA | 1583 | | | X | 154535369 | + |
| 154535369 | GGAGTTGCGGGCAAA | | | | | | |
| | GAAGTCCTCCAGCTT | | | | | | |
| | GAGCT | | | | | | |
| X_ | CTGGCCAGCCACATA | 1584 | | | X | 154535369 | + |
| 154535369 | GGAGTTGCGGGCAAA | | | | | | |
| | GAAGTCCTCCAGCTT | | | | | | |
| | GAGCT | | | | | | |
| X_ | CTGGCCAGCCACATA | 1585 | | | X | 154535369 | + |
| 154535369 | GGAGTTGCGGGCAAA | | | | | | |
| | GAAGTCCTCCAGCTT | | | | | | |
| | GAGCT | | | | | | |
| X_ | CACATAGGAGTTGCG | 1586 | | | X | 154535379 | + |
| 154535379 | GGCAAAGAAGTCCTC | | | | | | |
| | CAGCTTGAGCTTCTC | | | | | | |
| | CTCTG | | | | | | |
| X_ | CACATAGGAGTTGCG | 1587 | | | X | 154535379 | + |
| 154535379 | GGCAAAGAAGTCCTC | | | | | | |
| | CAGCTTGAGCTTCTC | | | | | | |
| | CTCTG | | | | | | |
| X_ | CACATAGGAGTTGCG | 1588 | | | X | 154535379 | + |
| 154535379 | GGCAAAGAAGTCCTC | | | | | | |
| | CAGCTTGAGCTTCTC | | | | | | |
| | CTCTG | | | | | | |
| rs78230 | TGGGGGAGGCCCTGA | 1589 | | | X | 154535962 | + |
| 8266 | CACCACCCACCTTGA | | | | | | |
| | AGAAGGGCTCACTCT | | | | | | |
| | GTTTG | | | | | | |
| rs78230 | TGGGGGAGGCCCTGA | 1590 | | | X | 154535962 | + |
| 8266 | CACCACCCACCTTGA | | | | | | |
| | AGAAGGGCTCACTCT | | | | | | |
| | GTTTG | | | | | | |
| rs78230 | TGGGGGAGGCCCTGA | 1591 | | | X | 154535962 | + |
| 8266 | CACCACCCACCTTGA | | | | | | |
| | AGAAGGGCTCACTCT | | | | | | |
| | GTTTG | | | | | | |
| rs13868 | ACACCTTCATCGTGG | 1592 | | | X | 154535963 | − |
| 7036 | GCTATGCCCGTTCCC | | | | | | |
| | GCCTCACAGTGGCTG | | | | | | |
| | ACATC | | | | | | |
| rs13868 | GGGGGAGGCCCTGAC | 1593 | | | X | 154535963 | + |
| 7036 | ACCACCCACCTTGAA | | | | | | |
| | GAAGGGCTCACTCTG | | | | | | |
| | TTTGC | | | | | | |
| rs13868 | ACACCTTCATCGTGG | 1594 | | | X | 154535963 | − |
| 7036 | GCTATGCCCGTTCCC | | | | | | |
| | GCCTCACAGTGGCTG | | | | | | |
| | ACATC | | | | | | |
| X_ | CACCCACCTTGAAGA | 1595 | | | X | 154535980 | + |
| 154535980 | AGGGCTCACTCTGTT | | | | | | |
| | TGCGGATGTCAGCCA | | | | | | |
| | CTGTG | | | | | | |
| X_ | CACCCACCTTGAAGA | 1596 | | | X | 154535980 | + |
| 154535980 | AGGGCTCACTCTGTT | | | | | | |
| | TGCGGATGTCAGCCA | | | | | | |
| | CTGTG | | | | | | |
| X_ | CACCCACCTTGAAGA | 1597 | | | X | 154535980 | + |
| 154535980 | AGGGCTCACTCTGTT | | | | | | |
| | TGCGGATGTCAGCCA | | | | | | |
| | CTGTG | | | | | | |
| rs78209 | GTGGCTGTTCCGGGA | 1598 | | | X | 154535995 | − |
| 0947 | TGGCCTTCTGCCCGA | | | | | | |
| | AAACACCTTCATCGT | | | | | | |
| | GGGCT | | | | | | |
| rs78209 | GTGGCTGTTCCGGGA | 1599 | | | X | 154535995 | − |
| 0947 | TGGCCTTCTGCCCGA | | | | | | |
| | AAACACCTTCATCGT | | | | | | |
| | GGGCT | | | | | | |
| rs78209 | AGGGCTCACTCTGTT | 1600 | | | X | 154535995 | + |
| 0947 | TGCGGATGTCAGCCA | | | | | | |
| | CTGTGAGGCGGGAAC | | | | | | |
| | GGGCA | | | | | | |
| rs13785 | GGGCTCACTCTGTTT | 1601 | | | X | 154535996 | + |
| 2349 | GCGGATGTCAGCCAC | | | | | | |
| | TGTGAGGCGGGAACG | | | | | | |
| | GGCAT | | | | | | |
| rs13785 | GGTGGCTGTTCCGGG | 1602 | | | X | 154535996 | − |
| 2349 | ATGGCCTTCTGCCCG | | | | | | |
| | AAAACACCTTCATCG | | | | | | |
| | TGGGC | | | | | | |
| rs13785 | GGGCTCACTCTGTTT | 1603 | | | X | 154535996 | + |
| 2349 | GCGGATGTCAGCCAC | | | | | | |
| | TGTGAGGCGGGAACG | | | | | | |
| | GGCAT | | | | | | |
| rs10508 | ACTCTGTTTGCGGAT | 1604 | | | X | 154536002 | + |
| 28 | GTCAGCCACTGTGAG | | | | | | |
| | GCGGGAACGGGCATA | | | | | | |
| | GCCCA | | | | | | |
| rs10508 | ACTCTGTTTGCGGAT | 1605 | | | X | 154536002 | + |
| 28 | GTCAGCCACTGTGAG | | | | | | |
| | GCGGGAACGGGCATA | | | | | | |
| | GCCCA | | | | | | |
| rs10508 | CCCTCAGGTGGCTGT | 1606 | | | X | 154536002 | − |
| 28 | TCCGGGATGGCCTTC | | | | | | |
| | TGCCCGAAAACACCT | | | | | | |
| | TCATC | | | | | | |
| X_ | TTGCGGATGTCAGCC | 1607 | TTGCGGATGTCAGCC | 2179 | X | 154536008 | + |
| 154536008 | ACTGTGAGGCGGGAA | | ACTGTGAGGCGGGAA | | | | |
| | CGGGCAYRGCCCAYG | | CGGGCAYRGCCCAYG | | | | |
| | ATGAA | | ATGAT | | | | |
| X_ | TTGCGGATGTCAGCC | 1608 | TTGCGGATGTCAGCC | 2180 | X | 154536008 | + |
| 154536008 | ACTGTGAGGCGGGAA | | ACTGTGAGGCGGGAA | | | | |
| | CGGGCATAGCCCACG | | CGGGCATAGCCCACG | | | | |
| | ATGAA | | ATGAT | | | | |
| X_ | TTGCGGATGTCAGCC | 1609 | TTGCGGATGTCAGCC | 2181 | X | 154536008 | + |
| 154536008 | ACTGTGAGGCGGGAA | | ACTGTGAGGCGGGAA | | | | |
| | CGGGCATAGCCCACG | | CGGGCATAGCCCACG | | | | |
| | ATGAA | | ATGAT | | | | |
| X_ | AGCCACTGTGAGGCG | 1610 | AGCCACTGTGAGGCG | 2182 | X | 154536019 | + |
| 154536019 | GGAACGGGCATAGCC | | GGAACGGGCATAGCC | | | | |
| | CACGATGAAGGTGTT | | CACGATGAAGGTGTT | | | | |
| | TTCGA | | TTCGG | | | | |
| X_ | AGCCACTGTGAGGCG | 1611 | AGCCACTGTGAGGCG | 2183 | X | 154536019 | + |
| 154536019 | GGAACGGGCATAGCC | | GGAACGGGCATAGCC | | | | |
| | CACGATGAAGGTGTT | | CACGATGAAGGTGTT | | | | |
| | TTCGA | | TTCGG | | | | |
| X_ | AGCCACTGTGAGGCG | 1612 | AGCCACTGTGAGGCG | 2184 | X | 154536019 | + |
| 154536019 | GGAACGGGCATAGCC | | GGAACGGGCATAGCC | | | | |
| | CACGATGAAGGTGTT | | CACGATGAAGGTGTT | | | | |
| | TTCGA | | TTCGG | | | | |
| X_ | AGCCACTGTGAGGCG | 1613 | AGCCACTGTGAGGCG | 2185 | X | 154536019 | + |
| 154536019 | GGAACGGGCATAGCC | | GGAACGGGCATAGCC | | | | |
| | CACGATGAAGGTGTT | | CACGATGAAGGTGTT | | | | |
| | TTCGA | | TTCGG | | | | |
| X_ | ACTGTGAGGCGGGAA | 1614 | | | X | 154536021 | + |
| 154536021 | CGGGCATAGCCCACG | | | | | | |
| | ATGAAGGTGTTTTCG | | | | | | |
| | GGCAG | | | | | | |
| X_ | ACTGTGAGGCGGGAA | 1615 | | | X | 154536021 | + |
| 154536021 | CGGGCATAGCCCACG | | | | | | |
| | ATGAAGGTGTTTTCG | | | | | | |
| | GGCAG | | | | | | |
| X_ | ACTGTGAGGCGGGAA | 1616 | | | X | 154536021 | + |
| 154536021 | CGGGCATAGCCCACG | | | | | | |
| | ATGAAGGTGTTTTCG | | | | | | |
| | GGCAG | | | | | | |
| X_ | CTGTGAGGCGGGAAC | 1617 | | | X | 154536025 | + |
| 154536025 | GGGCATAGCCCACGA | | | | | | |
| | TGAAGGTGTTTTCGG | | | | | | |
| | GCAGA | | | | | | |
| X_ | CTGTGAGGCGGGAAC | 1618 | | | X | 154536025 | + |
| 154536025 | GGGCATAGCCCACGA | | | | | | |
| | TGAAGGTGTTTTCGG | | | | | | |
| | GCAGA | | | | | | |
| X_ | GCACTGGTTACAGCT | 1619 | | | X | 154536025 | − |
| 154536025 | GTGCCCTGCCCTCAG | | | | | | |
| | GTGGCTGTTCYRGRA | | | | | | |
| | TGGCC | | | | | | |
| rs13785 | GCGGGAACGGGCATA | 1620 | | | X | 154536032 | + |
| 2315 | GCCCACGATGAAGGT | | | | | | |
| | GTTTTCGGGCAGAAG | | | | | | |
| | GCCAT | | | | | | |
| rs13785 | GCGGGAACGGGCATA | 1621 | | | X | 154536032 | + |
| 2315 | GCCCACGATGAWGGT | | | | | | |
| | GTTTTCGDGCAGARG | | | | | | |
| | GCCAT | | | | | | |
| rs13785 | GCGGGAACGGGCATA | 1622 | | | X | 154536032 | + |
| 2315 | GCCCACGATGAAGGT | | | | | | |
| | GTTTTCGGGCAGAAG | | | | | | |
| | GCCAT | | | | | | |
| rs13785 | GCGGGAACGGGCATA | 1623 | | | X | 154536032 | + |
| 2315 | GCCCACGATGAAGGT | | | | | | |
| | GTTTTCGGGCAGAAG | | | | | | |
| | GCCAT | | | | | | |
| X_ | GGGAACGGGCATAGC | 1624 | | | X | 154536034 | + |
| 154536034 | CCACGATGAAGGTGT | | | | | | |
| | TTTCGGGCAGAAGGC | | | | | | |
| | CATCC | | | | | | |
| X_ | GGGAACGGGCATAGC | 1625 | | | X | 154536034 | + |
| 154536034 | CCACGATGAAGGTGT | | | | | | |
| | TTTCGDGCAGARGGC | | | | | | |
| | CATYC | | | | | | |
| X_ | GGGAACGGGCATAGC | 1626 | | | X | 154536034 | + |
| 154536034 | CCACGATGAAGGTGT | | | | | | |
| | TTTCGGGCAGAAGGC | | | | | | |
| | CATCC | | | | | | |
| X_ | GGAACGGGCATAGCC | 1627 | | | X | 154536035 | + |
| 154536035 | CACGATGAAGGTGTT | | | | | | |
| | TTCGGGCAGAAGGCC | | | | | | |
| | ATCCC | | | | | | |
| X_ | GGAACGGGCATAGCC | 1628 | | | X | 154536035 | + |
| 154536035 | CACGATGAAGGTGTT | | | | | | |
| | TTCGGGCAGAAGGCC | | | | | | |
| | ATCCC | | | | | | |
| X_ | GGAACGGGCATAGCC | 1629 | | | X | 154536035 | + |
| 154536035 | CACGATGAAGGTGTT | | | | | | |
| | TTCGGGCAGAAGGCC | | | | | | |
| | ATCCC | | | | | | |
| X_ | AGCCCACGATGAAGG | 1630 | AGCCCACGATGAAGG | 2186 | X | 154536045 | + |
| 154536045 | TGTTTTCGGGCAGAA | | TGTTTTCGGGCAGAA | | | | |
| | GGCCATYCYRGAACA | | GGCCATYCYRGAACA | | | | |
| | GCCAC | | GCCAG | | | | |
| X_ | AGCCCACGATGAAGG | 1631 | AGCCCACGATGAAGG | 2187 | X | 154536045 | + |
| 154536045 | TGTTTTCGGGCAGAA | | TGTTTTCGGGCAGAA | | | | |
| | GGCCATYCYRGAACA | | GGCCATYCYRGAACA | | | | |
| | GCCAC | | GCCAG | | | | |
| X_ | AGCCCACGATGAAGG | 1632 | AGCCCACGATGAAGG | 2188 | X | 154536045 | + |
| 154536045 | TGTTTTCGGGCAGAA | | TGTTTTCGGGCAGAA | | | | |
| | GGCCATCCCGGAACA | | GGCCATCCCGGAACA | | | | |
| | GCCAC | | GCCAG | | | | |
| X_ | CACACCTGTTCCCTC | 1633 | | | X | 154536151 | − |
| 154536151 | TGCCACAGGGTGACC | | | | | | |
| | TGGCCAAGAAGAAGA | | | | | | |
| | TCTAC | | | | | | |
| X_ | CACACCTGTTCCCTC | 1634 | | | X | 154536151 | − |
| 154536151 | TGCCACAGGGTGACC | | | | | | |
| | TGRSCAAGAAGAAGA | | | | | | |
| | YCTAC | | | | | | |
| X_ | ACACCTGTTCCCTCT | 1635 | ACACCTGTTCCCTCT | 2189 | X | 154536151 | − |
| 154536151 | GCCACAGGGTGACCT | | GCCACAGGGTGACCT | | | | |
| | GGCCAAGAAGAAGAT | | GGCCAAGAAGAAGAT | | | | |
| | CTACT | | CTACC | | | | |
| rs76645 | GGGAGGTCACAGGGG | 1636 | | | X | 154536156 | + |
| 461 | CAGTGGTGGGACACA | | | | | | |
| | CTTACCAGATGGTGG | | | | | | |
| | GGTAG | | | | | | |
| rs76645 | GGGAGGTCACAGGGG | 1637 | | | X | 154536156 | + |
| 461 | CAGTGGTGGGACACA | | | | | | |
| | CTTACCAGATGGTGG | | | | | | |
| | RGTAG | | | | | | |
| rs76645 | GGGAGGTCACAGGGG | 1638 | | | X | 154536156 | + |
| 461 | CAGTGGTGGGACACA | | | | | | |
| | CTTACCAGATGGTGG | | | | | | |
| | RGTAG | | | | | | |
| rs78478 | CAGCCACTTCTAACC | 1639 | CAGCCACTTCTAACC | 2190 | X | 154536168 | − |
| 128 | ACACACCTGTTCCCT | | ACACACCTGTTCCCT | | | | |
| | CTGCCACAGGGTGAC | | CTGCCACAGGGTGAC | | | | |
| | CTGGG | | CTGGC | | | | |
| X_ | GCAGTGGTGGGACAC | 1640 | GCAGTGGTGGGACAC | 2191 | X | 154536169 | + |
| 154536169 | ACTTACCAGATGGTG | | ACTTACCAGATGGTG | | | | |
| | GGGTAGATCTTCTTC | | GGGTAGATCTTCTTC | | | | |
| | TTGGT | | TTGGC | | | | |
| X_ | GCAGTGGTGGGACAC | 1641 | GCAGTGGTGGGACAC | 2192 | X | 154536169 | + |
| 154536169 | ACTTACCAGATGGTG | | ACTTACCAGATGGTG | | | | |
| | GRGTAGRTCTTCTTC | | GRGTAGRTCTTCTTC | | | | |
| | TTGGT | | TTGGC | | | | |
| X_ | CCAGCCACTTCTAAC | 1642 | CCAGCCACTTCTAAC | 2193 | X | 154536169 | − |
| 154536169 | CACACACCTGTTCCC | | CACACACCTGTTCCC | | | | |
| | TCTGCCACAGGGTGA | | TCTGCCACAGGGTGA | | | | |
| | CCTGA | | CCTGG | | | | |
| X_ | ACTTCCTGGCTTTTA | 1643 | | | X | 154546046 | + |
| 154546046 | AGATTGGGGCCTGGG | | | | | | |
| | AGATACTCACCGATG | | | | | | |
| | CACCC | | | | | | |
| X_ | ACTTCCTGGCTTTTA | 1644 | | | X | 154546046 | + |
| 154546046 | AGATTGGGGCCTGGG | | | | | | |
| | AGATACTCACCGATG | | | | | | |
| | CACCC | | | | | | |
| X_ | ACTTCCTGGCTTTTA | 1645 | | | X | 154546046 | + |
| 154546046 | AGATTGGGGCCTGGG | | | | | | |
| | AGATACTCACCGATG | | | | | | |
| | CACCC | | | | | | |
| rs13785 | CTTTTAAGATTGGGG | 1646 | CTTTTAAGATTGGGG | 2194 | X | 154546050 | + |
| 2338 | CCTGGGAGATACTCA | | CCTGGGAGATACTCA | | | | |
| | CCGATGCACCCRTGA | | CCGATGCACCCRTGA | | | | |
| | TGATG | | TGAAT | | | | |
| rs13785 | CTTTTAAGATTGGGG | 1647 | CTTTTAAGATTGGGG | 2195 | X | 154546050 | + |
| 2338 | CCTGGGAGATACTCA | | CCTGGGAGATACTCA | | | | |
| | CCGATGCACCCRTGA | | CCGATGCACCCRTGA | | | | |
| | TGATG | | TGAAT | | | | |
| rs13785 | CTTTTAAGATTGGGG | 1648 | CTTTTAAGATTGGGG | 2196 | X | 154546050 | + |
| 2338 | CCTGGGAGATACTCA | | CCTGGGAGATACTCA | | | | |
| | CCGATGCACCCATGA | | CCGATGCACCCATGA | | | | |
| | TGATG | | TGAAT | | | | |
| X_ | CGGGAAGAGCTTTTC | 1649 | | | X | 154546057 | − |
| 154546057 | CAGGGCGATGCCTTC | | | | | | |
| | CATCAGTCGGATACA | | | | | | |
| | CACAT | | | | | | |
| X_ | CGGGAAGAGCTTTTC | 1650 | | | X | 154546057 | − |
| 154546057 | CAGGGCGATGCCTTC | | | | | | |
| | CATCAGTCGGATACA | | | | | | |
| | CACAT | | | | | | |
| X_ | CGGGAAGAGCTTTTC | 1651 | | | X | 154546057 | − |
| 154546057 | CAGGGCGATGCCTTC | | | | | | |
| | CATCAGTCGGATACA | | | | | | |
| | CACAT | | | | | | |
| rs13785 | CCTGCGGGAAGAGCT | 1652 | | | X | 154546061 | − |
| 2340 | TTTCCAGGGCGATGC | | | | | | |
| | CTTCCATCAGTCGGA | | | | | | |
| | TACAC | | | | | | |
| rs13785 | CCTGCGGGAAGAGCT | 1653 | | | X | 154546061 | − |
| 2340 | TTTCCAGGGCGATGC | | | | | | |
| | CTTCCATCAGTCGGA | | | | | | |
| | TACAC | | | | | | |
| rs13785 | CCTGCGGGAAGAGCT | 1654 | | | X | 154546061 | − |
| 2340 | TTTCCAGGGCGATGC | | | | | | |
| | CTTCCATCAGTCGGA | | | | | | |
| | TACAC | | | | | | |
| X_ | ATCCGACTGATGGAA | 1655 | | | X | 154546116 | + |
| 154546116 | GGCATCGCCCTGGAA | | | | | | |
| | AAGCTCTTCCCGCAG | | | | | | |
| | GATCC | | | | | | |
| X_ | ATCCGACTGATGGAA | 1656 | | | X | 154546116 | + |
| 154546116 | GGCATCGCCCTGGAA | | | | | | |
| | AAGCTCTTCCCGCAG | | | | | | |
| | GATCC | | | | | | |
| X_ | ATCCGACTGATGGAA | 1657 | | | X | 154546116 | + |
| 154546116 | GGCATCGCCCTGGAA | | | | | | |
| | AAGCTCTTCCCGCAG | | | | | | |
| | GATCC | | | | | | |
| X_ | TTCCACCAGACAGCG | 1658 | | | X | 154546122 | − |
| 154546122 | TCATGGCAGAGCAGG | | | | | | |
| | TGGCCCTGAGCCGGA | | | | | | |
| | CCCAG | | | | | | |
| X_ | TTCCACCAGACAGCG | 1659 | | | X | 154546122 | − |
| 154546122 | TCATGGCAGAGCAGG | | | | | | |
| | TGGCCCTGAGCYGGA | | | | | | |
| | CCCAG | | | | | | |
| X_ | TTCCACCAGACAGCG | 1660 | | | X | 154546122 | − |
| 154546122 | TCATGGCAGAGCAGG | | | | | | |
| | TGGCCCTGAGCCGGA | | | | | | |
| | CCCAG | | | | | | |
| X_ | GGCATCGCCCTGGAA | 1661 | | | X | 154546131 | + |
| 154546131 | AAGCTCTTCCCGCAG | | | | | | |
| | GATCCCGCACACCTG | | | | | | |
| | GGTCC | | | | | | |
| X_ | GGCATCGCCCTGGAA | 1662 | | | X | 154546131 | + |
| 154546131 | AAGCTCTTCCCGCAG | | | | | | |
| | GATCCYGCACAMCTG | | | | | | |
| | GGTCC | | | | | | |
| X_ | GCATCGCCCTGGAAA | 1663 | GCATCGCCCTGGAAA | 2197 | X | 154546131 | + |
| 154546131 | AGCTCTTCCCGCAGG | | AGCTCTTCCCGCAGG | | | | |
| | ATCCYGCACAMCTGG | | ATCCYGCACAMCTGG | | | | |
| | GTCCA | | GTCCG | | | | |

### Other Embodiments

[0208] It is to be understood that while the invention has been described in conjunction with the detailed description thereof, the foregoing description is intended to illustrate and not limit the scope of the invention, which is defined by the scope of the appended claims. Other aspects, advantages, and modifications are within the scope of the following claims.

1. A method of genotyping one or more pharmacogenomic markers, the method comprising:
obtaining a nucleic acid sample;
amplifying a first portion of the genomic DNA sample by whole genome amplification (WGA), thereby producing a WGA sample portion;
amplifying a second portion of the genomic DNA sample by a targeted gene amplification (TGA) method that selectively amplifies one or more pharmacogenomic genes or fragments thereof, thereby producing a TGA sample portion;
optionally combining the whole genome amplified sample portion and the target amplified sample portion to produce a combined WGA/TGA sample portion;
fragmenting the WGA or WGA/TGA sample;
hybridizing the WGA and TGA samples or the WGA/TGA combined sample to a plurality of probes complementary to one or more of the pharmacogenomic genes or fragments thereof; and
detecting hybridization, thereby genotyping a pharmacogenomic marker.

2. The method of claim 1, wherein the nucleic acid sample is a genomic DNA sample is from a human subject.

3. The method of claim 1, wherein the one or more pharmacogenomic genes are selected from the group consisting of ABCB1, ABCC4, ABCG2, ACE, ALDH1A1, ALK, BCKDK, BCR, BRAF, C8orf34, CACNA1S, CES1, CFTR, CHRNA3, COL22A1, COQ2, CRHR1, CYP19A1, CYP21A2, CYP2A6, CYP2A7P1, CYP2B6, CYP2C19, CYP2C8, CYP2C9, CYP2D6, CYP2E1, CYP3A, CYP3A5, CYP4F2, DPYD, DYNC2H1, EGFR, EPHX1, ERBB2, F5, FCGR3A, FKBP5, G6PD, GGCX, GSTM1, GSTT1, HCP5, HLA-A, HLA-B, HLA-C, HLA-DPB1, HLA-DQA1, HLA-DRB1, HMGCR, IFNL3, IFNL4, KCNIP4, KIF6, KIT, LPA, MTRR, NEDD4L, NQO1, NUDT15, OPRM1, POLG, POR, PRKCA, PRSS53, PSORS1C1, PTGFR, RYR1, SCN1A, SCN5A, SEMA3C, SLC19A1, SLC28A3, SLC6A4, SLCO1B1, SLCO1B3, SOD2, SULT1A1, TANC1, TBXAS1, TMEM43, TPMT, TXNRD2, TYMS, UGT1A1, UGT1A4, UGT1A5, UGT2B17, UGT2B28, VDR, VKORC1, YEATS4, ZNRD1-AS1, and combinations thereof.

4. The method of claim 3,
wherein the one or more pharmacogenomic genes are selected from the group consisting of BCKDK, CACNA1S, CFTR, CYP2A7P1, CYP2B6, CYP2B6, CYP2C19, CYP2C9, CYP2D6, CYP3A, CYP3A5, CYP4F2, DPYD, F5, G6PD, HCP5, HLA-A, IFNL3, NUDT15, PRSS53, PSORS1C1, RYR1, SLCO1B1, TPMT, UGT1A1, VKORC1, ZNRD1-AS1, and combinations thereof; or
wherein the one or more pharmacogenomic genes are selected from the group consisting of ABCB1, ABCC4, ABCG2, ACE, ALDH1A1, ALK, BCR, BRAF, C8orf34, CACNA1S, CES1, CFTR, CHRNA3, COL22A1, COQ2, CRHR1, CYP19A1, CYP21A2, CYP2A6, CYP2B6, CYP2C19, CYP2C8, CYP2C9, CYP2D6, CYP2E1, CYP3A5, CYP4F2, DPYD, DYNC2H1, EGFR, EPHX1, ERBB2, F5, FCGR3A, FKBP5, G6PD, GGCX, GSTM1, GSTT1, HLA-A, HLA-B, HLA-C, HLA-DPB1, HLA-DQA1, HLA-DRB1, HMGCR, IFNL3, IFNL4, KCNIP4, KIF6, KIT, LPA, MTRR, NEDD4L, NQO1, NUDT15, OPRM1, POLG, POR, PRKCA, PTGFR, RYR1, SCN1A, SCN5A, SEMA3C, SLC19A1, SLC28A3, SLC6A4, SLCO1B1, SLCO1B3, SOD2, SULT1A1, TANC1, TBXAS1, TMEM43, TPMT, TXNRD2, TYMS, UGT1A1, UGT1A4, UGT2B17, UGT2B28, VDR, VKORC1, YEATS4, and combinations thereof.

5. (canceled)

6. The method of claim 1, wherein the one or more pharmacogenomic markers are selected from those in Table 9.

7. The method of claim 6,
wherein the one or more pharmacogenomic markers are copy number variants in ABCB1, ABCC4, ABCG2, ACE, ALDH1A1, ALK, BCR, BRAF, C8orf34, CACNA1S, CES1, CFTR, CHRNA3, COL22A1, COQ2, CRHR1, CYP19A1, CYP21A2, CYP2A6, CYP2B6, CYP2C19, CYP2C8, CYP2C9, CYP2D6, CYP2E1, CYP3A5, CYP4F2, DPYD, DYNC2H1, EGFR, EPHX1, ERBB2, F5, FCGR3A, FKBP5, G6PD, GGCX, GSTM1, GSTT1, HLA-A, HLA-B, HLA-C, HLA-DPB1, HLA-DQA1, HLA-DRB1, HMGCR, IFNL3, IFNL4, KCNIP4, KIF6, KIT, LPA, MTRR, NEDD4L, NQO1, NUDT15, OPRM1, POLG, POR, PRKCA, PTGFR, RYR1, SCN1A, SCN5A, SEMA3C, SLC19A1, SLC28A3, SLC6A4, SLCO1B1, SLCO1B3, SOD2, SULT1A1, TANC1, TBXAS1, TMEM43, TPMT, TXNRD2, TYMS, UGT1A1, UGT1A4, UGT2B17, UGT2B28, VDR, VKORC1, YEATS4, and combinations thereof, or
wherein the one or more pharmacogenomic markers are selected from the group consisting of those in Table 9, copy number variants in ABCB1, ABCC4, ABCG2, ACE, ALDH1A1, ALK, BCR, BRAF, C8orf34, CACNA1S, CES1, CFTR, CHRNA3, COL22A1, COQ2, CRHR1, CYP19A1, CYP21A2, CYP2A6, CYP2B6, CYP2C19, CYP2C8, CYP2C9, CYP2D6, CYP2E1, CYP3A5, CYP4F2, DPYD, DYNC2H1, EGFR, EPHX1, ERBB2, F5, FCGR3A, FKBP5, G6PD, GGCX, GSTM1, GSTT1, HLA-A, HLA-B, HLA-C, HLA-DPB1, HLA-DQA1, HLA-DRB1, HMGCR, IFNL3, IFNL4, KCNIP4, KIF6, KIT, LPA, MTRR, NEDD4L, NQO1, NUDT15, OPRM1, POLG, POR, PRKCA, PTGFR, RYR1, SCN1A, SCN5A, SEMA3C, SLC19A1, SLC28A3, SLC6A4, SLCO1B1, SLCO1B3, SOD2, SULT1A1, TANC1, TBXAS1, TMEM43, TPMT, TXNRD2, TYMS, UGT1A1, UGT1A4, UGT2B17, UGT2B28, VDR, VKORC1, YEATS4, and combinations thereof.

8. (canceled)

9. The method of claim 1, wherein amplifying a second portion of the genomic DNA sample comprises amplifying one or more regions of one or more pharmacogenomic genes or fragments thereof that differ in their nucleotide sequence from one or more pseudogenes of the one or more pharmacogenomic genes, optionally wherein the one or more regions of the one or more pharmacogenomic genes or fragments thereof share at least 99%, 98%, 97%, 96%, 95%, 94%, 93%, 92%, 91%, or 90% identity in its nucleic acid sequence with the corresponding one or more pseudogenes or fragments thereof.

10. (canceled)

11. The method of claim 1, wherein:
detecting hybridization comprises single-base extension (SBE), allele-specific primer extension (ASPE), or both SBE and ASPE, and/or
wherein amplifying comprises a PCR reaction with a dNTP mixture comprising dATP, dTTP, dGTP, dCTP, and dUTP and a dUTP incorporating polymerase; and/or
wherein fragmenting comprises incubating with uracil DNA glycosylase (UDG).

12. (canceled)

13. (canceled)

14. A method of selecting a drug treatment for a patient in need thereof, the method comprising:
identifying a patient in need of a drug treatment;
determining, or having determined, the genotype of pharmacogenomic marker(s) according to the method of claim 1; and
based on said genotyping, selecting a drug treatment for the patient.

15. The method of claim 14,
wherein selecting a drug treatment for the patient comprises determining that a drug is suitable for administration to the patient by identifying one or more drug interactions with the genotype of one or more the pharmacogenomic markers, and, optionally, administering a drug with a positive treatment outcome associated with one or more of the genotypes of the one or more pharmacogenomic markers and/or not administering a drug with a negative treatment outcome associated with one or more of the genotypes of the one or more pharmacogenomic markers, or
wherein selecting a drug treatment includes determining that a drug is not suitable for administration to the patient and, optionally, not administering the drug.

16. (canceled)

17. An array composition comprising:
a solid surface; and
one or more nucleic acids selected from the group consisting of nucleic acids comprising or consisting of the sequences of SEQ ID NOS: 22-2217, wherein the one or more nucleic acids are bound to the solid surface.

18. The array composition of claim 17, comprising:
(i) at least 100 nucleic acids selected from the group consisting of nucleic acids comprising or consisting of the sequences of SEQ ID NOS: 22-2217; or
(ii) at least 500 nucleic acids selected from the group consisting of nucleic acids comprising or consisting of the sequences of SEQ ID NOS: 22-2217;
(iii) at least 1000 nucleic acids selected from the group consisting of nucleic acids comprising or consisting of the sequences of SEQ ID NOS: 22-2217; or
(iv) at least 1500 nucleic acids selected from the group consisting of nucleic acids comprising or consisting of the sequences of SEQ ID NOS: 22-2217.

19. A composition comprising one or more nucleic acids selected from the group of nucleic acids comprising or consisting of SEQ ID NOS: 4-19 and, optionally, a polymerase and/or a target nucleic acid.

20. The composition of claim 19, wherein the composition comprises nucleic acids comprising or consisting of:
(i) SEQ ID NO:4 and SEQ ID NO:5;
(ii) SEQ ID NO:6 and SEQ ID NO:7;
(iii) SEQ ID NO:8 and SEQ ID NO:9;
(iv) SEQ ID NO:10 and SEQ ID NO:11;
(v) SEQ ID NO:12 and SEQ ID NO:13;
(vi) SEQ ID NO:14 and SEQ ID NO:15;
(vii) SEQ ID NO:16 and SEQ ID NO:17; and/or
(viii) SEQ ID NO:18 and SEQ ID NO:19.

21. The composition of claim 19, wherein the composition comprises oligonucleotides comprising or consisting of the sequences of SEQ ID NOS: 4, 5, 6, 7, 8, 9, 10, 11, 12, 13, 14, 15, 16, 17, 18, and 19.

22. A kit comprising the composition of claim 19.

23. The kit of claim 22, wherein the composition comprises or consists of:
(i) SEQ ID NO:4 and SEQ ID NO:5;
(ii) SEQ ID NO:6 and SEQ ID NO:7;
(iii) SEQ ID NO:8 and SEQ ID NO:9;
(iv) SEQ ID NO:10 and SEQ ID NO:11;
(v) SEQ ID NO:12 and SEQ ID NO:13;
(vi) SEQ ID NO:14 and SEQ ID NO:15;
(vii) SEQ ID NO:16 and SEQ ID NO:17; and/or
(viii) SEQ ID NO:18 and SEQ ID NO:19.

24. The kit of claim 22, further comprising:
a dNTP mixture; and
a polymerase,
optionally wherein the dNTP mixture comprises dUTP and the polymerase is a dUTP incorporating polymerase.

25. (canceled)

26. The kit of claim 24, further comprising:
uracil DNA nucleotide glycosylase and/or
the array composition of claim 20 or claim 21; and/or
random oligonucleotides for WGA.

27. (canceled)

28. (canceled)

29. A method of amplifying a target nucleic acid by polymerase chain reaction, the method comprising contacting the target nucleic acid with the composition of claim 19, wherein the composition comprises a polymerase.

The application's sequence listing, which the Patent Office published only in electronic form, follows.

SEQUENCE LISTING (2225 sequences)

SEQ ID NO: 1 - DNA, 4312 bp, Homo sapiens
atttggtagtgaggcaggtatggggctagaagcactggtgcccctggccgtgatagtggccatcttcctgctcctggtggacctgatgcaccggcgccaacgctgggctgcacgctacccaccaggccccctgccactgcccgggctgggcaacctgctgcatgtggacttccagaacacaccatactgcttcgaccaggtgagggaggaggtcctggagggcggcagaggtgctgaggctcccctaccagaagcaaacatggatggtgggtgaaaccacaggctggaccagaagccaggctgagaaggggaagcaggtttgggggacgtcctggagaagggcatttatacatggcatgaaggactggattttccaaaggccaaggaagagtagggcaagggcctggaggtggagctggacttggcagtgggcatgcaagcccattgggcaacatatgttatggagtacaaagtcccttctgctgacaccagaaggaaaggccttgggaatggaagatgagttagtcctgagtgccgtttaaatcacgaaatcgaggatgaagggggtgcagtgacccggttcaaaccttttgcactgtgggtcctcgggcctcactgctcaccggcatggaccatcatctgggaatgggatgctaactggggcctctcggcaattttggtgactcttgcaaggtcatacctgggtgacgcatccaaactgagttcctccatcacagaaggtgtgacccccacccccgccccacgatcaggaggctgggtctcctccttccacctgctcactcctggtagccccgggggtcgtccaaggttcaaataggactaggacctgtagtctggggtgatcctggcttgacaagaggccctgaccctccctctgcagttgcggcgccgcttcggggacgtgttcagcctgcagctggcctggacgccggtggtcgtgctcaatgggctggcggccgtgcgcgaggcgctggtgacccacggcgaggacaccgccgaccgcccgcctgtgcccatcacccagatcctgggtttcgggccgcgttcccaaggcaagcagcggtggggacagagacagatttccgtgggacccgggtgggtgatgaccgtagtccgagctgggcagagagggcgcggggtcgtggacatgaaacaggccagcgagtggggacagcgggccaagaaaccacctgcactagggaggtgtgagcatggggacgagggcggggcttgtgacgagtgggcggggccactgccgagacctggcaggagcccaatgggtgaggctggcgcatttcccagctggaatccggtgtcgaagtggggggcggggaccgcacctgtgctgtaagctcagtgtgggtggcgcggggcccgcggggtcttccctgagtgcaaaggcggtcagggtgggcagagacgaggtggggcaaagccctgccccagccaagggagcaaggtggatgcacaaagagtgggccctgtgaccagctggacagagccagggactgcgggagaccagggggagcatagggttggagtgggtggtggatggtggggctaatgccttcatggccacgcgcacgtgcccgtcccacccccaggggtgttcctggcgcgctatgggcccgcgtggcgcgagcagaggcgcttctccgtgtccaccttgcgcaacttgggcctgggcaagaagtcgctggagcagtgggtgaccgaggaggccgcctgcctttgtgccgccttcgccaaccactccggtgggtgatgggcagaagggcacaaagcgggaactgggaaggcgggggacggggaaggcgaccccttacccgcatctcccacccccaggacgcccctttcgccccaacggtctcttggacaaagccgtgagcaacgtgatcgcctccctcacctgcgggcgccgcttcgagtacgacgaccctcgcttcctcaggctgctggacctagctcaggagggactgaaggaggagtcgggctttctgcgcgaggtgcggagcgagagaccgaggagtctctgcagggcgagctcccgagaggtgccggggctggactggggcctcggaagagcaggatttgcatagatgggtttgggaaaggacattccaggagaccccactgtaagaagggcctggaggaggaggggacatctcagacatggtcgtgggagaggtgtgcccgggtcagggggcaccaggagaggccaaggactctgtacctcctatccacgtcagagatttcgattttaggtttctcctctgggcaaggagagagggtggaggctggcacttggggagggacttggtgaggtcagtggtaaggacaggcaggccctgggtctacctggagatggctggggcctgagacttgtccaggtgaacgcagagcacaggagggattgagaccccgttctgtctggtgtaggtgctgaatgctgtccccgtcctcctgcatatcccagcgctggctggcaaggtcctacgcttccaaaaggctttcctgacccagctggatgagctgctaactgagcacaggatgacctgggacccagcccagcccccccgagacctgactgaggccttcctggcagagatggagaaggtgagagtggctgccacggtggggggcaagggtggtgggttgagcgtcccaggaggaatgaggggaggctgggcaaaaggttggaccagtgcatcacccggcgagccgcatctgggctgacaggtgcagaattggaggtcatttgggggctaccccgttctgtcccgagtatgctctcggccctgctcaggccaaggggaaccctgagagcagcttcaatgatgagaacctgcgcatagtggtggctgacctgttctctgccgggatggtgaccacctcgaccacgctggcctggggcctcctgctcatgatcctacatccggatgtgcagcgtgagcccatctgggaaacagtgcaggggccgagggaggaagggtacaggcgggggcccatgaactttgctgggacacccggggctccaagcacaggcttgaccaggatcctgtaagcctgacctcctccaacataggaggcaagaaggagtgtcagggccggaccccctgggtgctgacccattgtggggacgcatgtctgtccaggccgtgtccaacaggagatcgacgacgtgatagggcaggtgcggcgaccagagatgggtgaccaggctcacatgccctacaccactgccgtgattcatgaggtgcagcgctttggggacatcgtccccctgggtgtgacccatatgacatcccgtgacatcgaagtacagggcttccgcatccctaaggtaggcctggcgccctcctcaccccagctcagcaccagcacctggtgatagccccagcatggctactgccaggtgggcccactctaggaaccctggccacctagtcctcaatgccaccacactgactgtccccacttgggtggggggtccagagtataggcagggctggcctgtccatccagagcccccgtctagtggggagacaaaccaggacctgccagaatgttggaggacccaacgcctgcagggagagggggcagtgtgggtgcctctgagaggtgtgactgcgccctgctgtggggtcggagagggtactgtggagcttctcgggcgcaggactagttgacagagtccagctgtgtgccaggcagtgtgtgtcccccgtgtgtttggtggcaggggtcccagcatcctagagtccagtccccactctcaccctgcatctcctgcccagggaacgacactcatcaccaacctgtcatcggtgctgaaggatgaggccgtctgggagaagcccttccgcttccaccccgaacacttcctggatgcccagggccactttgtgaagccggaggccttcctgcctttctcagcaggtgcctgtggggagcccggctccctgtccccttccgtggagtcttgcaggggtatcacccaggagccaggctcactgacgcccctcccctccccacaggccgccgtgcatgcctcggggagcccctggcccgcatggagctcttcctcttcttcacctccctgctgcagcacttcagcttctcggtgcccactggacagccccggcccagccaccatggtgtctttgctttcctggtgagcccatccccctatgagctttgtgctgtgccccgctagaatggggtacctagtccccagcctgctccctagccagaggctctaatgtacaataaagcaatgtggtagttccaa

SEQ ID NO: 2 - DNA, 27117 bp, Homo sapiens
gtgcagggcagtcagaccaggaccatggaactcagcgtcctcctcttccttgcactcctcacaggactcttgctactcctggttcagcgccaccctaacacccatgaccgcctcccaccagggccccgccctctgccccttttgggaaaccttctgcagatggatagaagaggcctactcaaatcctttctgagggtaagacacagacgaatggggtctgagggtgagctgcttcttgccttggtacttggggaagcttcaccaaacagaatgaggcagacttccagagtcaggggtggcacgggcatggttggtgagtacggagcatggtgaagcatgatgggtggtattattaggagaaaagcatcaaattaaatttagcagagtttatttgagcaaagaagtgactcatgagttggacagctccctaaaccaggaaagacaccacacggcagtatggtcaagtggtatttacaggcagaaaaaggaggtgacatacagaaacagcctgattggccacagatcacagcttgccttacttggtcacaatctgagcagtttgcagcctgtgtggactgaaagcccagctgctctgattagccaacacttggctacttgtcacaagaatatattcatttgggccaggtgcagtggctcatgcctgtaatcccagtgcttttggaggccgaggtggtggatcacctgaggtcaggagttcgagaccagcctggccaacatggtgaaaccttgtctctactaaaaatacaaatattagctgggcatagtgatgcgtgcctgtaatctcagctacccaggaggctgaggaaggagaatcacttgaatccaggaggcagaggttgcagtgagccaaaatcttaccactgcactccatcctgggtgacagagtgagactccttctcaaaaaaaaaaaaaaaaaaaagaatatactcccaagttaggttgcagttcactctacagagagagctttaggtcaaatttaatttaattaaacaattctccccttttggtcagcctcaaaattttgagattgaccaaaaccttgggcatcaacattacttctgtcaccatcataatggacttgtctgctctcagtatggaattcacaatggacaatgtcaacgtagttgagtgattctttaccttttcttcatgtttttgttgttcccactgtaatgagcccactggatgtacaaagaatggctgcatatgagcatttaagactctttttttttctgagacagggcctcactctgtcagccaggctgaagtgctgtggcatgatcacgtctcactgcagccttgacctcccaaggctcaagtgatcctcctgcctcagccccccaagtagctggaactacaggtgcatgccaccacgcccagctaatttttgtattttttgtagagacagggttttgccatgttgcccagactggtcttaaactcctgggctcaagcaatccacctgcctcggcctcccaaagtgctaggattacatgtgtgagccaccgcacccggccaagactcttgagaaaatacaacacatcagggagactgttatgatggctctcaggagggtaatacgaagaaaatgaagtcactgggcctgtaataaactttgaggaatgtggacttgggggtatagataaggtccactgtccacagagagaagaaaggctgttaatagtctcttttaacttgagtgtgtccatgaaccaaactgatcaaaatcgaataattcgaagttcagacaataaagatagttcaatagtattagagtccaattggtcatagattttgttcagggcatgatggtaattaaggaccagagcttgctataaaataacttgatttatagagacattcatttgtagttggcctggtaacatatagtatcctggagacccactagaagaaacattaagagtagaaaagtttgggatagccaggcttgctgtgttagtccattctcacactgttataaagacatacctgagactgggtaatttataaacaaaagggatgtaactgactcacagttccacatggctggggaggccccaggaaaatacaattcatggcaaaaggtgaatgagaagcaggaaacttacaatcatgatggaaggtgaaggagaagcaagtaccttcttcacaaggtggcaggaaaaagagagagagccaagggggaagagcctcttataaaaccatcagatcttgtgagaactcactcactatcacaagaacagcatgggggaaaccgcccccaggatccagttacctcctactaggtccttccctccacacctggggattacaattcaagatgagatttgggtgaggacacagagccaaaccatatcacttaccatcaccattcaggatgcttgcaaaccaactgctagctgcacctgtaaacacatatctgtttctttcccctgagaaatgtccttagtgtatttgtggcagtgtctagagaaacagcagtgtcagccgcattttaaattaagttatctgcactagtgaattcactggaaagataagagcaatatttggttttcttcagcaccatacacaagcctccaagatgggcatagaggagatctaaaattgcgtgatgttccattaagcgtttttgttgccacaaatgttctcatctcagtttggagagtggcttctacccatctgaactccttggaggttcaattagctgcaaaattcaagatgtcccttaatgtataacttagcctcagattccatacaactgtcacccaaataccaccaagaatgagcacccaggaacccaactggaaccttttctgaacagaaaccaacttatcttcgtcgattttgaggttgatagtaatttcagttattgactgttttggcttttaactatgggaggtattaggaaactctcagggaaacaatttggaaagcagcagtgagctaggccaaatagcaagttctggacctgtgaggagaaagaacagagtaagcaaacctcaagatactcaaggtaggcactcgtggtgttggaaaagagggtcacctactggcattagagcagagatcagttagatttgtttacccataagtctgcatagctcctgaacaaggtgggaaacttacttttttgtggtctttttctagcatgctgcgaaggtgcataaccacatttagttggaaagagactttactgtatttacttatttatttgtttttaatagagttggggtcgtgctatgttgaactcttggcctcaagcaatcctcccatctcaatctcccaaagtgctgggattacaagcatgagccaccatgcctggccactttacatatttaatccagtaacattacacacgcaattgcccacacccccataggtagtccccaggtcttgcatacgggatgcctggaagcaaaatatgccttttgcagccattattcagatacatttcctatatttagtagtgattatgttattagctagttaatagtatgttattacgtactgttattatattaactaactaataacataatcactactaaatatttccagtgagtgcaaaaaagcaagtggcaatgatgtctagaatatcaagatatagctttccactcctcctttggggtttctgggtgattctcattgggaacatgaagaggcattggcaccagtgaaattatttcctgattttggggcgttggttcagaaactcaacaactccttgttttttttgtttgtttgcttgttttgctagagtataagcctttgctaaagccattcacagattatagtcctatggattttcttgtaaggaaagggaaagggttaggacagcaagaaatggggaagaaaggataaaagataatgctttcatgatggaagagaaatcttgatccacaatcttggaaaagctgtccgcatataagatgccaactgcttctggggaaaaacttccctggtcagctttgccttaaggtctccaacagacatacagttctaggagtctagaagggtcctttccaatggagagatgtggatccaagatccgagaccctgacattttgctacagagaagaacttggcattgtccttcccaatggagtacaaggaacagtcttagaagaacttggtacggtctcttccaatggagttcaaggacagtttgtctggtgtcatttccaaagggcccaacctctaaattctagatcatgaaaggtctggttgtcatcaaccgatgtgtcatcaatgactcattttacctggtgaaaacatgctttggcataaagtattatagccttgcattattgagtcatatcagagtttataagagtgggagatacatgagattctattattaggggcataggccctctattactattttacaagagatctatctatgtctttccagtaggagtggatctgattgccatcaatcaataatacctgagaccaagggactccaatcaattcagcatgctttgcctaatgatatttgtttgtaatactgttgcgggacaatcaaagactggagagaccaaaaaaggttcaggagagtttattaaattaaggtgatcaccggttcagccagacatacatccagaaagtctgagccccgaacaaaggcttttcctacttttaaacatattaaggtgggaactacatgaggcaggaagccagtttcagaagtgagaaacaaagcagttaaataacatttcttacatcttgagaaagacatgtcttgcaacctaaccttatcggtccggtgaccctgcagctgtgcaggaactcactgggcctgtaataaactttgagggatgtggagttggggagtataggtaaggtccactgtccacagagagaagacaggctgttaatattctcttttaacttgaatgtaaggtgtggtcatactttgcagcaaccttaagaggattttaaaatttatattactactactattaggttatagttgatttcattaattccttcttcaataccttatttaactgttttaccacttgtctagtgaaacaagtacctctgtcactggagagttctccaggaatgcccagtaaggaaatacattttctaataaccttttatctacggttatggcattgattgatctttgtgcatagaaatgctttaatacaaccagaaaacatgcaatgaagctggcagttgaattaactccagcttcaagtgttcaaatgatctaccaagtgccagaaatatatcacctgaggtttttgttgtcttactagaattatggatttgataaaccaaatattagttataaaccatttagtaatcttagaatagtcacctcatcaatattttttcactgtttggatcattttctctcttctatgatgagtcatggaatacggagcttttagtaatggaaattttaagaactcaggaaggaccaggcggccatctagggtctccatgagtgcatgcttcacattggaattacagactctaaagtacaaattttaatacaatgagttgcaatttatgcttctctaattcaggtacataacactggtttattaaataggttatcataggtaatttgatggtgccattgcactccagcctgggtaacagattgagaccctgtctctgaattggaactgcacgggggcactgtccttggaggggtgaatgggcatgaagaggtgtctgggtatgagccacaggtatagaatttcactcttctctgccatcctctgttacatcctgggtacctgcctgccactgaaagaatgaggtaaaagaggtggtggcacgaatcaaatagatcttgctgtgccaatgagagagagcagactagcccatgtcagtgccaggagagtggaggagagagggagagcaggagaggagtgtgggtagggagtgctcatcaacagtacacatagtgccctataccggtaactgccactggctcagtatttacctgggttatcactgcttaccatgcctgattttatgattaattatctacttatcattactaatccatcaacccactttccaatgggagaattagaacactgacaataccttccagctcctcttccccttccccctcccatgttgaccatactcctgaatcttaggctcgttatccttttactattaatagagttatttttttaatttctgatcaatggtctttttaatgataccaagtacagagtatatatgccaatactactatgaatttttaaattatttgctcagacagaatacatggacatacaaatgatgaatgtgataattgtcatacatatatatttatcttagacacttagtcaaaacatgtggtctttggttatcagttagacactgtcactttacctggaagatacaaggtaattggtcacagactctcaaattatgaaacatttagatttttcaggggaatgacatggagggagccaaggagtcttatgattagataagatgttgtttgggtggctcacgacaccactgggcaacactcaaagaggtggtggcttatacctgtaatcccaacactttgggaggctgaggtgggaggatcgcttgaagccaggagttagaaaccagcctgggcaaccaaacaagacctggctctacaaaaaagttttaaaaatttagccaggcatggtggcatgtgcctgtagtcccagctacttgggagactgaggcaggaggatgacttgagccttgtagtttgaggctgcagtgagctatgatcacgtcactgccctccagcctgggcacagagcaagaccctgtctcttaaaaaaaaatcatctgcaatgtgaggagtgataacatttaggaacgtgtgtataggtttaaatgctggtcaaagacatcctacacaattcgctgaaccttctctctaagggttttttcccaagctctgcagacgctatctgggcacaaatcatgcctctgttaacagaatttgctgttccttctagctcttggtatcccactgcccgctttctttatgaaagctggtatggtcattgaatatcccaatcctttacaaatttggaaacaagcaaaactgtcaatgaaatttgtatttgcctaaaatgagttttctttctttcttttttattattattatactttaagttttagggtacatgtgcacattgtgcaggttagttacatacgtatacatgtgccatgctggtgcgctgcacccactaactcgtcatctagcattaggtatatctcccaatgctatccctcccccctccccccaccccacaacagtccccagagtgtgatgtttcccttcctgtgtccatgtgatctcattgttcaattcccacctatgagtgagaatatgtggtgtttggtttttttgttcttgcgatagtttactgagaatgatgatttccaatttcatccatgtccctacaaaggacatgaactcatcattttttatggctgcatagtattccatggtgtatatgtgccacattttcttaatccagtctatcattgttggacatttgggttggttccaagtctttgctattgtgaataatgccgcaataaacatacatgtgcatgtgtctttatagcagcatgatttatagtcctttgggtatatacccagtaatgggatggctgggtcaaatggtatttctagttctagatccctgaggaatcgccacactgacttccacaatggttgaactagtttacagtcccaccaacagtgtaaaagtgttcctatttctccacatcttctccagcacctgttgtttcctgactttttaatgattgccattctaactggtgtgagatggtatctcattgtggttttgatttgcatttctctgatggccattgatgttgagcattttttcatgtgttttttggctgcataaatgtcttcttttgaaaagtgtctgttcatgtctttcgcccactttttgatggggttgtttttttcttgtaaatttgtttgagttcattgtagattctggatattagccctttgtcagatgagtaggttgcgaaaattttctcccattttgtaggttgcctgttcactctgatggtagtttcttttgctgtgcagaagctctttagtttaattagatcccatttgtcaattttgtcttttgttgccattggttttggttttttagacatgaagtccttgcccatgcctatgtcctgaatggtaatgcctaggttttcttctagggtttttatggttttaggtctaacgtttaagtctttaatccatcttgaattgattttgtatactaaaatgagttttcaaaaggatctttgtggctaccttattagttcatagaaagtggaggcttgtctggaatgatattaaagaatttttttcattttaattgttttagagacagggtctcagtctgttacccaggctggagtacaatggcacagtcatagctcactgcagccttgaactcctgtgctcaggagattctcccaccttagcctccagagtagctgggactaaaagtgtgagccaccatgccccactatttatttttgtagagatgtgtttgggggacggtctcactatgttgcctaggctggtctcgaactcctggactcaagcaatcctcctgcctcaacctcccaaagcattgggataagttttgcatagacatgtttgaccctctcccttcctttattgcagcaaagatttccattttctcacagggaggacttggggcaaattgtttttgtcgttgttattgttatttgaggatgtgggtgggtcatcttggttaatgtcagtgcaagaacggtgtctgctcctcattattggggttccttagctattcaggcaggcagcagctcccttgagaagacttcctgacccccaggtccccatcatatgctctcatacaccagctgcccctccttactgagcctatgtccttgatagtgctgcatttacctgtgatcctgtggctgagctctccctcacacttccagacaaggaaggcctgtgaggtatcagcacagtgctgaacatagtacctggtacacaataggcatttagtaaatatgtgaacaggaacaaatgaaggagtcagtgagtgaaagctccaagcctgactcagcggaactggcagtcggccagggcctacaaagtgctgcctggccctcagtagggggtggcagatctggggatccctcttcaccaaatagagttgcatcatacaggtaaaggtcccaagtgcctattgttttcttttcatcattttccatgtgtgacaagagtatcacgcaatcatgtgaatcaatggacttagttttctcactagactaatgtgtctaggaattatctgtgttgtcatggggattttccaggtgtcatttacaactacctgtggacaagatgaggtgctaccctcatcttagaattagggatggtggctgggcatggcagcccatgcctataatctcagcactttgggaggctgaagcaggtggatcaactgaggtcgggagttcgagaccaacctgaccaacatggagaaaccctgtctgtactaaaaaacacaaaactagctgggcatggtggcacatgtctgtaatcccagctactcgggaggctgaggcaggagaattgcttgaacccaggaggcggagtttgccctgagctgagattgcatcattgcactccatcatgggcaacaaaagtgaaactccatctcaaaaaaaacccaaacagaaacaaacaaacaaacaaaattagtgatagtgatgctcagcctggggaaagcatttgtccagtggcacacaactgggaaaaggggaagctgagatccagcaggaggtctgtctccaaagccctcctagactaaagctgcttaacaatttgtggattatgaaattctcatagagtttgattaaagctgtggccccctcttttccaaataggcacatacatgtttgcataaagttgtgaggcttcacacactccctaaaactctttcataaaccttccaaggatcctctaggtattcacgaccatctattatgattgcatctcttgggggtggggtaaagagggagggcatgagcaagtgtgcatcagggctgaggaaggtggcgctgttgcttctccatttcccaataagcttccagattctttttgatgtcagagggatgtgggctcgtgtctcagattcaacccgtatgcattgagtcacagttttctcttccgtcagttaagatcatgacaatgagaatgtgtgcccctaaggtggttgtgaggattaaatgggatattgcatacagctagtatataataagtgctcattaaatggcaactaccttgatccactcattcatttattcacgaatccaataacaattcactgggcactttctatgtaccaggaaatagtctaggaattgatgatgtggcatcttggacaagacatacgaggtcactgcgcttatggacattccattggcagagacagataagcaaaaaataaacagataaggaaatgttaggtggagaagagctacaattaaactaaagcagggggatatttcagacagtgatgagaactacgttagattgagtggttaggggaagactgtcttgtttttttttctgagcagagacaatgaaagattcaggtggaaggcactagaaggaggcaggggtggctacaagaatcctgaaacaggaaaaatgtcagagaacaacatggaggaatgagtgggaggagaagtcagagcggtaatagggccacgtcatgtaggaccatgtgaaccctcagtggagacttcagatcttattctcagcaaagtgggaatattgtaggccttggtgagcacgtggatattaattattttacattttagtggggttaccctggcttgtggggcagtgaaacaattgttaagtggagtaagcatgtcatccagaagtccagtgaaggggctttgcagagatcaatgcagggcatttgtaagtaaacttaacaaattttatgacttttatgtcaagtttttattgaacttgaacatcactgtaaaaagcgcacagctcaatgaattttcacaaactgaacatactcatgtaattgacatgcaggccaagtagcaagaatgccccgaaaccctgcaccctgttcttttctattcactatccacctaccatcttgatcatgggttgattttatctgtgtatgaacttcttttttgtttttgtttgtttgttcctgagattgaattttgctctgtcgcccaggctggagtgcagtggcactatctcgcctcactgcaacctccgcctccccgggctcaagcaattctctcgtctcagcctcccgagtagctgggactacaggtgagagccaccatgcctggctaatttttgtatttttagtagagatgggttttcaccatgttggtcaggctggactcaaactcctgacctcgtgatcagcctgcctcagcctcccaaattgctgggattacagatgtgagtcaccacgcctggccctgtgtttgaacttcatacacataaaattatgatgcattgactcttttgtgcctagttgcttccactcaacattatgcctgtgagtttcagccacgttgtcgcctgtagctgtggtttgttcttttttgttgctgtatactagtctattgtgagaaccctcactgattgtctatatctatattgatgagcattttattaagaaagcttctgtgaatattttgttcattttttggtgaacacacatacacatttttgctgggcatgtacctgggagtgaagtggctggtttcctgggtatccatttgttcagcttcaggaaatactgcccagcagttccccaagtggctgcacagtaatcccaccttatccactggagatatcttctgagacccccagtggatgcctgaaaccccacataatactgagcactatgcatactctttttttttcctatacaatcacattatatagggagggtggtatacacagtgcagacatggtggacaaaggatgattcgtgtccggggtgggacagagtggatggtgagagatatcatcatcctactcagaatgatgcacaacttaaaacttacgaattctttatttctggaattttccatttaatattttcagactgcgattagctgcaggtaactgaaactgcaaaaagcaaaaccacagatcataagaagtatgcggtgggggtgatattcatcgtattttatcaaccatctttactgtttagggcacaagccaatcagagcagaccctggctgggccacccattaacctaagcttgtccaacctgccttattttgttgttgttctgttttgttttgttttagctttttagcagcctgaagccatggttttcagtttctgtctccagtgatacacagaaaggaaggatgaggaaggggctttactggcccaaccagaaacggaaactaagaacccatgactgtattctctcccttggacagcgttaaccattaacccttaattgctgggtcccagcaggggaaagggcagcctggggaggcggatgttggggaggggctaattaccaatctggtatgtaagtattttgatagttttacaaatgaggtgtatgctgactaacagccacccctggtgtggatgtgattggcagttccgagagaaatatggggacgtcttcacggtacacctgggaccgaggcccgtggtcatgctgtgtggagtagaggccatacgggaggcccttgtggacaaggctgaggccttctctggccggggaaaaatcgccatggtcgacccattcttccggggatatggtgagagcctcagaggcactgggagggggcgggtggggggtgcatcagggaagggagtatatgggaggaagaaggactcagagccttcttccaacttcttctacaaccaacccacacctcccctgcaccccaggtgtgatctttgccaatggaaaccgctggaaggtgcttcggcgattctctgtgaccactatgagggacttcgggatgggaaagcggagtgtggaggagcggattcaggaggaggctcagtgtctgatagaggagcttcggaaatccaagggtgagtcctgggggatgaataggaaagaaagacaatgaaacactgagagatgcaggtgcacgggaatagaaagacagagaggtatataagggcacagacagagacagacgaaactggagacaccatcagacagagggatagagacagagagggagagagacaggggaatagagagggatggggatgggcaggagagaaacacagagagccagggaaagagagagatgccaggtgtataatgtccaagagttactcaaagaggctggatgtgatgactctcacctgtaatcccagtactttgggaagctcaggcaggaggattgcttgaggccaagagttggagaacagcctgggcaacataatgagatcctgtctctacacaatatagaaaagaagtgagccacgcatggtggtgtgtgcctgtagtcccagctactcaggaggctaaggtgggactacaggatcacttgagcccaggaggttgaggttgcagtgagctgtgattgtaccactgcactccagcctggacaacagagcaagatcctgtctcaaacaaacaaacaaaccctcaaagacatataatttcatggatcaattgtgtctgtcaaagtcaaaaacggaagttaagtaaaagaaaaaaactacagacatttaacaaataatgaactgtgttttccttgccctgggtgaagtgctgatgagctggcagtgagcagacaggccaggtggggtgttctgcccgggtgcagctggaggggtcatcaaagaatcactaggttatttttgagttctccataacttggtgtctgtgagacatgtaggtgaagggtctctggctagcacctccatctcattcatgccaggtgtttaccatctctcttatcaaaatttctcaagagactctgggatgtaaatgcagaggctgcatggggaggtagagacccaggagctatagggaaacggggacaagaagactgaagagaaggacaggaagaaacagtgacacaggcaggaggaaagagacagatggagggaccaaaacaaaaaaatataggttgggtatggggctcatgcctgtaatcccagcactttgggaggctgaggctggcggatcatttgaggccagcagttcaaaaccagcctggccaacatggtgaaaccccatctgtgctaaaaatacaaaaattagccaggcttggtagcacgtgcctttaatcccagctactcaggaggctgagacaggagaattgattgagcctgggaaatggaggttgccgtgagctaagatcacactactgcactccagtctgcatgatagagtgagactctgtctccaaaaataataataataataataaaataaagaacggcaggggggagacaaatatacacacagagagacagaaagaaacaaaggcaaagagaaattgaggcagagaaaattagagagacagacagacaaagcttaggaaaaggtctgcagaggaatgagagaagacaggcaagtgagaaccagagagaggctgcactaacctgatgttcttgggtccttacagaccactctccctccagctggggccagtgctgagcctggtgtatacaggtatcacttaacaagtacagaataattcccagaagactggagagccctagatgtggaaagaagagattaagggggagtaataggtaggggtggaaagatggttttttatttgttttaaattagagacggggtctcactctgtacccaggctggagtgcagtggcacgatcatagctcactgcagcctcaaactcctgggcccatgtgatcctcccacttcagcccctggactatttcaactgggactacaggcatgtgccaccatgtctagctacatttttttttttttttttttgtagagacagggtctccttatgttgcccaggctggtcttgaattcctgatccttttgaatcaggctcccgaagtgctgggtttagaggtatgggcccctgtgcccacccagggctttttaatttatataagcaattgattgaacacctactctgcccagcccctatccctgggatttaactgtactcactcccagagtcagaggtggggcctgagaggaggtgcagagtgagaaccggctgcatggactctatagctgtgttgcctgggtctaaatcctggcctcagtaatgagtagctgtgcaactttggtcaaattactcagcctctcggtctgcccatctataaactggagctaataatcaaattgcatctgcctcacattgttgtagtgagagttcaatggaattacgcgtgacgtgctggtacataattagctgttacggttattctcatgtttaccattactgagtgatggcagacaatcacacagagataggtgacagcctgatgttccccaggcacttcagtctgtgtccttgacctgctgcttcttcctaggggccctcatggaccccaccttcctcttccagtccattaccgccaacatcatctgctccatcgtctttggaaaacgattccactaccaagatcaagagttcctgaagatgctgaacttgttctaccagactttttcactcatcagctctgtattcggccaggtcagggagacggagagggacagggggtgtgggggtgaggtgaacacccagaacacacgagaaaaggatgacctgtcttgggggctcagaaatgcagcttatccttggaagaaacgcagacatgtgaagaatcagggacatggagacctggagggaggagagacggtgagacagggatagagacactgagagagagaatgaggcgtgatggggaggcagaaatagagtcagagagagactgagagaaggaagatgagcaaaaacaagacaaagaagagcagaaatcaagagattctgagagacagagttgatgagaatgagtgtgaaagagagggagagagagagaacgaataaggctttgggcttcatgtctattctgctcctggatgtcatttctgttttattttttttagacggagtctcgctgtttcattccagctggggtgtagtgttgccatcttggcttactgcaacctccacctcccgggttcaagtgattctcctgcctcagcctcccaagtagctgggactgcaggcatgtgccaccacacctggctaatttttttttttttcttttcgagacagagcctcgctctgttgcctaggctggagtgcagtggcacaatctcagctcactgcaacttccacctccctggttcaagcaattcccctgcctcagcctcctgtagctgggattacaggcgcctgccgctatgccaggctaatgtttttgtatttttagtagagacggggtttcgccatgttggccaggctggtctctaactcctgacctcaagtgatctgcccgcctcagactcctaaagtgctggaattacaggtgtgagccaccatgcccagactgcttctggttcttctgtatccttgcttctcagtctttggtaaagctctccacctaaagaaaatgaaggataaatgacaataaggaacagcatttcttcattttctcccatttctccttctccctctgtgtttttttttttaactttccccagattgtaaaggcagtcttctgctcttttaaaacaaaatactaaaatgtctccttatttattaacctggaaatatgcctattacatattaaatttaagaatatcaagctgcagaacagtatgcatagctgtagtttgttgttgttgttgttttcagacagtatcttgctctgttactcaggctggagtgcagtagtgtgatctcaactccctgccacctccacctcccaggttcaagcaattctcatggctcagcctcccgagcagccgggactataggcgagcgccaccacacccagctaatttttttgtatttttagtagagatggtgtttcaccatgtcggccaggctggtcaacatagctacagctattaagcagggatgtatgttggattcacatgtggggttgtcacagttatggattttcaggaccctactttctgggcggtctgatctggaaagtctgggatggggcccaaggtgagtacttgtaacaagcccgaccagtaattctaatgttctcctcccaccgagaaccacagagaaaagtctggaaggagacccaccagacagttaacaatggttatctctagaaggagagattaagaaggaaatttacatctgactatatatgtttgcatttttgcaattatttgcaataaattaggcattccattcttcatcaaagtaatagaaataacctccaaaatacgtagtcctaacatgtcagcaggcttatcttgtgtaagaatcattttattaatatctgacacagcaagggagatgaggagaggtgggaagagggagagaaaagtatgagaaagacaaataaacaggctgaggtagacaatgggtgacacagaaaggaagtgagacagagactaagagagatagaaaggagagaggcagggagatggggcagaggccaagaaaaagacagaaggatgagggaggaagatgcagaaagaggtaaatgtgagatagatcaaaggagatatagagtcagtgagtgaggggttcagaggcagaggggagtggggaagtggggttcccatggagggattggggcccaggaggcgctctctccctgtgacctgctagctcagccctaggcaaacctcaccaccccttctttcttgcagctgtttgagctcttctctggcttcttgaaatactttcctggggcacacaggcaagtttacaaaaacctgcaggaaatcaatgcttacattggccacagtgtggagaagcaccgtgaaaccctggaccccagcgcccccaaggacctcatcgacacctacctgctccacatggaaaaagtggggtctgggagaggaaaaagggaagggaggggagggagggcaagatggagaggtgagaagagggagggaaaaggggtagggaaggggaagatggggagggaagaagaaagactagggaggggagaatagggaaagggaggagagaacatgaggaaggaaagaaagatgaggtgaaaggagggagaaaatagggaggaggaactgagacagggagagaggggaggtgggaagacagaatgaaagacagagggagagagagagaagactggctgaggaaggaattcggggcaagggacaaaaatacagcaacaagagaaaaaactcacagaggcagaaagagacggggacaaaaagagagaaacacatcaaagagatgtggagagagatagaaacagagttaggaagactaaagagaggctgagagagatgagttagagatacgcggttggatgtgtagaggacagagaaaagcaaactgggccagatagtgtcaaagacctttaggccaacggagggcagccagggagatgggcgtatacacagcaaggctacagcctcccctgaccctccccttccttccctactgtggacgcaggagaaatccaacgcacacagtgaattcagccaccagaacctcaacctcaacacgctctcgctcttctttgctggcactgagaccaccagcaccactctccgctacggcttcctgctcatgctcaaataccctcatgttgcaggtgggccagggacagccagtcaagggggtcttctgacctccttctgagctgcagaaatggggctatgggtaccacctggatgagagaggggatgctggcttcctattctgggagcactgtaggctctgggctagattccaaccaagccaattctgttggtggatgcatggatgcatgaagaatctgtccatgcgttctcccactgttttcttccatcacttaaggattttttgttctaaggtttttgtttgtttgtttgttttttgttttttggtttttttttttttgtcttttttgagacagagtctcgctctgtcacccaggctggagtgcagtggcatgctcttggcttactgcaagcttcacttccagggttcacgccattctcctgcctcagcttcccgagtagctggaactacaggcgcctgccaccacacccggctaattttttgtgtttttagtagagatggggtttaaccatgttagccaggatggtctcgatctcctgacctcatgatgtacaaatttagggggtacatatgcagttttgttacatgcgtaggttttgtaatggtcaagtttgggctgttagggtatttatcacccaaacagtgtacattgtacccattaagtaatttctcatcattcaccccccttctgctccctcactcttctgagtcttcactgtgtatcattcctctctctgtgtccatgtgtacacattttgtagcactcactcatgagtgagaacatgcaatatttgactttctgtgccatcacttaaaaatcgatccatccacttatcatttcatctattcattctttaattcattaattaaagaatgtataattactgattctttcatttatgattcatctaaggacatatactgtcattcatttatttggattacttgatccacaagttgatcctttgaaacagtggtatgttgatggactatttgtcattgattcattggctcattcattcattcattcatgcattcatccatccttctacgaactaggtttcactcttatccttccatgagtcaacctttcaattcacccttaatccatccgtgatttccttcatttatcacaataattcactcatttattcacctctgatctacttatcattcaatccagcctttcatttactcctttatttactcatacttcactaatttaattattcacttgctcttccataaatctagccattcatgtgattattcattaattgggttcattgatttctttgtctatggatcattcattagtgattaattaatcaatccatctattaattgataagtaaatacagacatccatttattggtttgttcatttattcatcaatctttccatccatgaattgatctattgattgattgattgatgtttttatccagttgttcatgaattcatctattgttctattacactgttatatacctgaggaccaagaatagtgtctcaactatattataaacacaataaatattagttcattttctactcatcttagagagggtgttttgagaggtttgtagcctggagttcttaatctgaaattccatgcaaaatcgtggtgtgtgtgtgcatgtgtgtgtgtgtacctgggcatgtgggaagaggatctgtaatattcattagatttcaagcagtgagaattcttgttgcttcctccctcctcccctcaccccatgctgattactttgaggggtatcaaggatctaaccctttactataggtttttcattggtcaatagaaagtagtgtccttgctgaaaggtctctttttaaaaaaatttttttttcttttgagatggagtcttgctctgtcacccagtctagagtgcagtggcatgatctcggctcactgcaacctccacctcctgggttcaagtgattctcctgcctcagcctcctgagtagctaggaatacaggtgtgcaccagcacacccagctaattttttgtatttttaggagagacgggattttgccatgttggccaggctcatcttgaactcctgacctcaaggaatccacccacctcaacctccaaaattgctgggattacaggcatgagccaccatgcctggcctgaaatgcctctttaaaatgagattcattggtcttcttttctgtacagagagagtctacagggagattgaacaggtgattggcccacatcgccctccagagcttcatgaccgagccaaaatgccatacacagaggcagtcatctatgagattcagagattttccgaccttctccccatgggtgtgccccacattgtcacccaacacaccagcttccgagggtacatcatccccaaggtaagaccggctggaaccccatagccctcctgtttgggcatcctggattctcttaatccccgaactcaaccttttgttagctccttaattgagtcccgttgtttttgttttttgtatttcttttttgtggagtgtgtggagggttggagggaatggcaatatcttttgatcttgtgatcctccctcaggacacagaagtatttctcatcctgagcactgctctccatgacccacactactttgaaaaaccagacgccttcaatcctgaccactttctggatgccaatggggcactgaaaaagactgaagcttttatccccttctccttaggtaagctggacccacaatttctttcccagacaccagagggcaggtactatccccaacttgagaaaaacaacgagagatactgattatttgagcacttaatatattctgattgcttcacctgccttatcccattccatcttcactacaaccctataaggaggcttgagaaagaagattacattcccaaaggcacatcttggcaagcaggaccttgggcaagtattttaacatctctaaacctcagtgagttcattttcttaaaaagaaaaaatctgttgggcaccactgtaagcccagtgctgtactgggggctgaagataatgcatcaaacaagtcacacagagacagggttcctgccccaggaaatttaaagtccagcagggaagatgggcattcatcaaataataataaaataatcatctcatgaaatgaatgaatgcctgcaacatgcttagaactgcctggcacaaaggacatgctcacaagggcaattattattataattagacataattgtgataagtgctctaaagggagctttgggagcacaaaataggaaatagtagctaatcttgtggtgggtccgtaaggaaaagcttaccagaggaactggcttccaagctaacatgttcatgggtgagcatcaatcaaccattgcaaagtgtgttccaggcaaaggaaacagcaaggacaaaggccaaaggtagaaacgtgatatggcaccattgagaacctataggaagtccagtgagccttgggtgtagattgcagaaggaaataagacaaagggctcatctgggcaggaccttgaaggttgcaggaggagtttggatttatggtctagcactgggaaggtggaaaaggtcttgacgtgctctgacttgtcccagttctcatcctctactctttggctggttaaaagaaaaactttagacaaattaaacttagcagagtctatctgaacaaagaaacaattcatgaattgggcagcacaaggaaccagtaaaggttcagagagctccatccagcaatgtggtcaggcactatttatccacagggaaaggaactgaggtactgaaacagcctgattggttacagctctgtgtttgccttatctgagcatgtctgggcagcttgtagcctgtgactggctgaagcttggctgccctgattgtccaaggttacttgttacaagaatatactctcaagtttgtttacatgttgagttacattacaatttgttatgtagggaggctgctttaggccaaatttaattgaatttaacatgcaccatccatgaaaggccccagaaacaaacccccagtcttgagtttcatcagtgacttcagtgatccagggtttggcccagcccccggttttgcgcagtacagtgacctccttccacattttatcttcaatgaaaattgggaacatgtgtggtgatggcttgaatgtcaatgtcttctctcaattttgctatctgaagtttctttttttttttttgtcttcagacggagtcttcctgtgttgcccaggctggagtgcagtgtcacgatcacagctcactgcaacctctgcctcccaggttcaagtgattctcctgcctcagcctcccgagtacctgaaactacgggcgcatgccaccatgcctggctatttttttttatttttagtagagactgggtttcaccgtgttagccaggatggtgctgatcttctgaccttgtgatatgcccacctcagtttctgaaagtcctgggattacaggcataagccactgcgactggcctgctaatttgttttaagagaggcagagatgtagggaaataaggacagagacagataagtaacaaagataatgagactgagaaacagagttagggacaaagagggaacacatagagatagagatggggagccagtggcagaaagacagagggcaaacctcagacagtatacagagaggaagagagagagacacagagagagagagagtcacgtaaggagaaggaggaggaggaggaataagaggagagagagtaggaaaaggaaggaggaggggagaaaggagggaaaggagagaaacagaataagagataggaaaaagagagagtgacataaaaagagaggaagaaagaatgaacaagacaaataaggtatctttagagggagatgaaaagaaagaatgagagagaaagagattggggagaaatcagattcaaatagatggagataggaagttaagcaagatggaagaaagccaaaaaaaggagaggaaaagaagaaaagctgtgtctgacaggtatagacagagaaaaagacaggagtagggctgccaggggcagaaagaaaggtataacccaagccaaaagggtactgcagccaaagaaattcgaaaggtgtccaaacagacggccccagagatggggagggcgtgatgagagggagataataagcctcaggctgttgtgaaaaatgttaggtcacacaaagagttacagaagaacaggcccagagacctgcctgtttctaagctcatgtcacccaccttctgggtatgccaaagggatgtggacacttttccaaacacctccacatagacacacttgtccaacaacttgacaggcatagggaatgcctgaaaactcacacttgacatggcctttccaaggtttgcagattatgaaacactgaagtgaagggaaaggctccctttgtctctgcctgagctttttccagcaccctttgttcttatttttctcccaatctgtggtttagaatctactgggggttccttgcacctctgagaatcagtggaagccatagaccctccctgtctcatacgcatcagtcccattcacaatttatatacaattgggcttttccccccttgagctcttgaagcctgtggatctcaggctgagactagaagacagcctagagacacagacacagacacatggccagaaacacataccccacacataccccagaaacaaacacaaggcagtaaccaaaccttaagcctccttagcacaagccaagtgctattctaagaatttttacaattgtctcctttaacctcacaagagccctttgagggaggtgccattctccccatatgagaagtgaagaacactaagaatgttgtcataaatgtgctcacactcacacatgtacaggtacacacacacacacacacacacagaaccagaaatgggtcattatactctgtgggtttcaccaaccctttggaactgtaacagaagctagaaactctcttatataaaaatgaacatggcgccgggtgcagtggctcatgcctgtaatcccactttgggaggccaaggcaggtggattatctgaggtcaggagctcgaggctagcctggccaatatgatgataccccatgtctactaaaaatagaagaaattagccaggcgtggtggcaggtgcctgtaatcccagctacttggtaggctgaggcacaagaatcatttgaaccacctgggaggtggaggttgcagtgagccaagatggtgccactgtgctccagtctgggtgacaaagagagactccatctcaaaaaaaaaaaaaaaaaaaaaaaaaaaaaaaaaaagagagagagagaaatgaacgtggcacatccactcaaagatttgcatctggtttcagagcagcttcctaaaagtccaccctgaattgtaggttaaaggccagtcttatgcaaatctgttgcagtggacatttgtgtctgggcttagggacatggcagagcgaagtgtatgcacctgccctgtgcccacactggtgaccttctgtgtccacagggaagcggatttgtcttggtgaaggcatcgcccgtgcggaattgttcctcttcttcaccaccatcctccagaacttctccatggccagccccgtggccccagaagacatcgatctgacaccccaggagtgtggtgtgggcaaaatacccccaacataccagatccgcttcctgccccgctgaaggggctgagggaagggggtcaaaggattccagggtcattcagtgtccccgcctctgtagacaatggctctgactccccgcaacttcctgcctctgagagacctgctacaagccagcttccttcccctccatggcaccagttgtctgaggtcacattgcaagtgagtgcaggagtgagattatcgaaaattataatatacaaaatcatatatatatatatgttcttgttttttgagacagagtctcacactgttgcccaggctggagtgcagtggcgtgatctcggctcactgcaacctccacccccggggatcaagcaactctcctgcctcagcctccctagtagctgggattacaggcatgcactaccacgcttggctaatttttgtatttttagtagagatggggtttcactgtgtaggccaggctggtctcgaactcctgaactcaagtgattcacccaccttagcctcccaaagtgctgggattacaggcgtgagtcaccgtgcccagccatgtatatatataattttaaaaattaagctgaaattcacataacataaaattagctgttttaaagtgtaaaatttagtggcgtgtggttcattcacaaagctgtacaaccaccaccatctagttccaaacattttctttttttctgagatggagtctcactctgtcacccaggttcgagttcagtggtgccatctctgtccactgcaacctccacatcctgggttcaagtgattctcctgcctcagcctctggaggagctggtatcacaggcgtcccccaccacgcctggctaaattttgtatttttaggtggtcttgaactcctgatgtcaggtgattctcctagctccaaatgttttcattatctctcccccaacaaaacccatacctatcaagctgtcactccccataccccattctctttttcatctcggcccctgtcaatctggtttttgtcactatggacttaccaattctgaatatttcccataaacagaatcatacaatatttgattttttttttttttttgaaactaagccttgctctgtctcccaggctggagtgctatggtgcaatttttgttcactgcaacctctgccttccaagatcaagagattctccagtctcagctcccaagtagctgggattacaggcatgtactaccatgcctggctaattttcttgtagttttagtagggacatgttggccaggctggtggtgagctcctggcctcaggtgatccacccacctcagtgttccaaagtgctgatattacaggcataatatgtgatcttttgtgtctggttgctttcatgttgaatgctatttttgaggttcatgcctgttgtagaccacagtcacacactgctgtagtcttccccagtcctcattcccagctgcctcttcctactgcttccgtctatcaaaaagcccccttggcccaggttccctgagctgtgggattctgcactggtgctttggattccctgatatgttccttcaaatctgctgagaattaaataaacatctctaaagcctgacctccccacgtcaa

SEQ ID NO: 3 - DNA, 26767 bp, Homo sapiens
gtcattggtggcggaggcaatggccggcaaccagctgtaagcgaggtaggctcactcgggcgcggagggtgcgggtgagaaagggaacgatttgctaggagtgtatgcgcccgtgctagggctcccaggaattcttacaagcgtagacagcctagcaatcagccctgtgaagtggggttcagggcagaagcggaaactgggaataacgaggtcggacagtaaatgacctgaatccaatgtccaggatttaaagtgcttccaaagcactggtgtgttttaattatttttttttcttttttcttttagagacagggtctccctctgtcgcccatgctagcgtgcagtggcacaatcatagctcactgtaacctggaactcctgggctcaagtgatcttcccgccccagcctcctcggtaactgggactacaggctcgctgcaccacgcttggctaatttttcaaatttttttttatagaaacggactctcggttttttccccagcctggtgtattagtgatttttgggaaaaaataagtactgccaaatagtgagtgatccctggtgatgtgggaaactggggtgctgtaaatattctgtcttgctctgcggtggttacacaggtgtatgtatatgtaaaaaattcaccgagtcatactcttttaagatgtgtgcaccttaggaaagtttcttctcaattttatgaaatttaaaaacaaaactatagcagaagcttttgaaaaggtgagaatggagactagaacaacttgaggactttgtttgtgggcagaaatttttgtgaaatttcccttccttaattcttgtaatgtgcactttttttgtattatagaaataaactttatttctctagaaatgatgtatacaagtggagtccatgctgagaaactgttagaacagctaagacgttgagcccaggagtttgagaccagcctgggtaacatagcaagaccctgtctctacaaaatatttaaaaattagccaggcatggtggtgcacccttatagtcccaggtactcaggaggttgaagtgagaggatcgcttgagccccagtgttggagacggaagtgtcattacaccactgcactccagcctgggggatagagagagaccctgtctcaaaaacaaacaactaagacatgattaagttatgtgcatgattttgttagacagttcaagtttgtgtgaaaggaatagagttgtgctactccaggctgctgtggaactctgataaagattatgcttctcttttaagtagagaactgctttatgaagccttgaatttaggttccagagtttctgaatgaaaatgagaaaactgcaacattcttttgcttttctgtacccaatataaatcagatactttctactgacctctcagaaaactcagagtcacctcctgataccatcagggtcttgcagaagccatttgtcaacaaatatttgctaagaagtgaattcatgttcccaggtaatgagagaaatgcctcctccctatatcctaagcatactgaggccaaatttggcaacaaaaggggaaatttgcctgaaatacatgcttttatgcaatgtttgctatttcacagattaatcattaaattagaaccaccaataatagcatgctagtataatccaaactagtttcactaatgatttaaagggaatgttagaataatggtgttatattgtccttaatattgcagagttgacattgaaaggaaaggcattttcctcatacattcagatggatctgcagttatggtctgtcagctgaagaatgagaagttcataatttagaaaggagaactctttctcatgaatggtttcagactgtagagcagccattctgactggctgagaagtgtagccgcaggccagaagccagaaactgacacttccagggaggggcaaagggaacaggaatttatgctgaggaaggtggccaaatatacatattcagtaagctgtaggatgactcatgaatatttatgaaaggaggaaagtacccatgagtaattgagcttcatgggtaccatgcacaaaaaatggcggtgttaccacaatcacaggatggagtttttggccctcttatatcaaaaggtgaagcagaggacagaaaaacccttactgtgcattctcagtagactggccagaaccattctgtggtctgtgatctcttatcaggcacaaaaggaggggcagcatcagggggttggttgatatcagtggtagaatcttttgaaagggctggtttcccttaagtccttatagaacaaagcctaattgtggttagcaagagaggaggtatagagttgtatctgacgctctatctactcttggcccagaactcagttttcaaggttactctggggtcccgttagccaagaaagtgtgtagtgagccaagatcgcaccactgcactccagcctgggcaacaagagcgaaactccatctcaaaaaaaaaaaaaagaaagaaagaaaaggaaagaaagtgtgccttcagtcagttgagaggctttgaattttattgttagtttacattgtacatgtcttttttcagtttccttagtgtgcatttcccatgcaaaaaaagaagctgtagaaaattatttgaaaatacaaatgtgtggagtagagataggatattgaactatggttcagtatctactttaatctgtttttgctgtctcctgaaaataacagaatttttttttaaggcataaagtactaggatagccaggacaggagagacaaaattagtaaaattttggaaaggcaaatggacaagtgggaaaggattttgcaacttcaaggaagctgaattctaaaccagcaatgagaaaagccattgagcagcccagtttgcaatacagaatccccaaatgctcaggattagcagcaccaggtacctccataaagtgtgagagtatggttgaaacaaggaggattgcttgaaatgctggttcagaacaggccaaatccccagatccttttctcaacttcttgcaaccaagtgtgtacatctcaccacaccagcaggctttggggatttattctctggaaagggtaaaacaaagagtgtctgtctagactgagaagatatgatacacagttgagcatgggagtatacaggaaacgtgaggattaattgaatacagcaaactggatgctgggaccctcgcccacttctcttcttttcttatatgagtatatgacagtggctccaacgacagaatccttaagacaggaattgggagatccatctatggaaagtctgactaccacaaggaaattaaagacattagccaggcatgagggtgtgcagctgcagtcccagatactttaaaggctgaggcgggaggatcacttgagcccagaagtttgaggctgtattgtgccactgcactacagcctgggtgacagagcgagaccctgcctcaaataaataaataaataaataaataaataaataaataaataaataaatctaggtttccaaatgaaatccactcacatcaccctacattataagccccacccacattctttgccttcattcattttatacctattcttttttttgtttttttcttaagacaaggtcttgatctgtagcccaggctggagtgcagtggcaccatcatagctcactgcagcctcgaactcctaggctcaagccatcctcctgcctcagcctcctgagtagctaagattacaggcatgcaccaccatgcctggccaattttaaaactgcttttgtagagatggagtctcactatgttgcccaagctagtctcaaactccaggcgtcaagccatcctcccactttggtcgcccaaagcactgggtgattgatagcaaaaaaaaaaaaaaaaagagagaagaagttaaaaaaatgagaattaaggtaaatctttcagaaaatagtacaaaaacatgaagatatagaaaaatagaaaaaaatgagaaatttaccataccgggtcagaagattctagagacaaataataggggtcccagaaggagaaataaaaaaagcagagggatggccaggctcagtggcccacgcctggaatcccagcactttgggaagccgaggctggtgaatcacatgaggccaggagttcaagaccagcctggccaacatggtcaaatctcatctctattaaaaacacaaaaattagctggacctggtagtgcatgcctgtaatcccagctactcaggaggctgaggtgggcgtgattcttcactaaacctttagggtgcccaaccccctatggcccccacacttctaaccaagaatttgatacccagcagagctatgcatcaaggatgaggaatagtctaaccgtgttttatacatgcaaaatggaaaaacattctttttcttccttgtgctctttcaggaagctctggaggttaggcttcaccaatataagcgtggtcactaaaaaataacaacaaaaaaaagaggaagacatgaaataaagctggagattcagacaagaaggaaatctccagaatgatgatgaagagcgatcccagaaagctagctgtctaccaagattagagaataatcagggcagattccaggagagaattctccaagatgatattgatagtatagctgatgactggagagactgactgtgtactgataggaaattgggacaattggcagaatttagagttgaattaggagtaagtacaataatgcctacgtgatgaagcctacataaaaacccaagaggatggggtttggagagcctcctaatagctcaacaggtgaaggtcctgtagctaacacatctcttcaagtatattcttcgcagtatcctttataataaatgtgcaaagataactaagtatttctctgaggtttgtgagttgctctagcaaattaagcaaacccaaagtggagggtgtgggaaccccaacttgaagccagtggaggcctggacttgcaactggtgtctaagtgaggagggaaatcttagggactgagcccccaacatatagaatctgacactatctccaggtaggtaatgtcagaattaaatcagaagatacccaactggtgtccaatatttggtgtgctgggggaagaacccccacatttggtcacagaaatcttgtgtgttgatgattggggtgtgagagcagaggaaacactaatattaagatagaattcagtttatttaatgatctcttgtaatgtgtattaaggggtattattctaccaccagacgcactgaaagtaattttttgttatcacttcttattggatgttgaaatggcaaggtgcagtgactcacacttgtaatcccagtgctttgcgaggccaagacagaaggatcccttgagcccaggcgttctttgttgtctggacaacaaaatgagaaccatctctattaaaaaatatatatatacaaaaattaaccaggtgtggtggtgtgtacctgaagtcccagctacttgggaggctgaaatgggaggatcgcttgagcccaggaggttgaagcttgcagtaagccagggtctccagcctgggtgacagagcaagaccttgtctctgaaaaaaaaaaaaacaaggaaagaaagattagctgggcatgatggtgcacacctgcagtcccagctacttgggaggctgaggcagcagaattgcttgaacctgggaggcagaggttgcagtgagccaagatcacactactgtaccccaggctgggagacagagtgagactccatctcaaaaataaaaccagaaataaaaaaagaaagaaatatttttaaaaagtcatactgctaagaataataggttttcatttagttcatcaatagaattccaatgaccttaaatgacaacattgcaaatattttccacgtaggcacggaagacatatgcttgtgagacaaaggtgtctctgaaactatggatggtacaagaacttcacttgacattgaagagtactcggatactgaggtacagaaaaaccaagtactaactctggaagaatggcaagacaagtgggtgaacggcaagactgcttttcatcaggaacaaggacatcagtaagaaatatttggtatacaatagagaaatgttctatcaaaaagtgactttgagatagaaataataaaagtacacattatttgactaacttttaggatgcacatttaattcttcacatttttgtgtctcccgagtcacagtgcatctgtggcatgatgtagtttaattggcagagtcttttcttcccacagtgtgtaaataatggtgtggcttacaaatgatgacatcttagatttataaaatatgttctttgatccctacggcacctatgtattggccctgaatatttatacctacaacaggtgctcaagcaatgtttatgcttacaattcttcatactgaaaatcagtggtgtctgactttgctttccaataggatgtgttcagatgttaaagaattatctctatggtgggagaaaagaagttgcgagaaattataaagtgagttaggatgttgtgcaatgtagtagtagtcttcatagcagcaataaatcatgggaccagtgctgagtaaagtggttgttagagacattccttgttctgggcagccacgcccatctccccaggagatgacatcatcatcatcatcatcatcataccagaaacactgggttatttctgtcatgtggatggccttagaagagccacatctccacagagggaattacaagaaactacaggagttacacttctcaggtttacttccgaggcttgagtacacgtttagagaacgtaccatgaaattaatgttgaaaaatccatggctccagaggctccatcacccccaaaatagtacatatttagagaattaataaagaattttcaaaacatccccaagaaaaaaaaattatttttaattactaatcaggaaagccctgggtgtaagtcagatttaccactgactgggtgtgtgtctgagcaagttacctgtttcttcatatgtaagctggagattataataattaatagtaactgcttattaaggttgttgggaatattaagtgagataatgaatgaaaagtgttcacctaccatacaattgtcctaaaacctttttttttttcctcttcaggctattaaagaagcatttagatactttccttaaaggcaagagtggactgagggtattttttcctctttgcggaaaagcggttgagatgaaatggtatgagcagataaacattaacagaattatcttgccttaatgatgaattctttgggtgatttaacaggatgtgagttttaaaactccattttcaggaaatacacagaaattccttatttttctattagtgatgggtatataattggaaataatattctcaaacagtaagaaacaacagaaacaggtatgaagtctttctggattgagttttgaaattaaaaaatcagtttggagccaatggggggagaaaaaacagccttcccttttacatttcctggatccttgtatgtggttcagtttttgtaggtggtttaggaatttagctaagttaatttttagatatttgaaatggtggtggacagagaaattcaaaatgaattacagctttttggcaggacaatgttcatagtccacagttcagctcaaccttcccctcccaccagggaacacaggagtttctgttatcgtgaatcattgttataaaaccagtgattaagaaagtatttcttgtgagtaattctctacaaagagaattcactttaacaagccacttttactatgagttaccctaaagtcacctcgacatcattctctatactgaactctcttgtaatgataatatacagatacaatcatacctgccaagatatgcatttatttataagcttgaatgttgagaactttgaccactgagcaggaaagaaaaaagaatgtatgaaaaggttagtaaatgcgccaggtgtggtggcctccgcctgtaatcccagcactttgggaggccaagacagaaggatctcttgagcccaggaatttgagaccagtctggacaacatagaccctgcctcaaaaaataaatttaaaataaaatattaataaatgtaaaatataataacctaaaaaatggtctattctgaatataaatatcggtgactaacgcagagtatgcatgcattttttgggagttgattttcaagtagagatgatagaatttttgcagccagcaaccaatcaactgtagctgagagcctttgttagagggctgctatgactttaagattcaagtgtggtcatgaaattgagaatatttaaactatattatgacatatattttaaccaattcattgagccagaagagatagttactttcaaaattaccctcaaaaaaaattaactctataaacagattgtcatgtgatgtcaccataaatggtaacaatgtagtacaaacaggttctgaggcaacattaggaaaatggtatgaaatagccaattaaatgtgattgttgaatatttggggtctaaagccatttgtaataaagacattacaaaaaatatcagaactggccaggtgcggtggctcacacctttaattaggtgagcggatcacttgaggtcaggagttcgagaccagcctggccaacatggtgaaaacccatctctactaaaaatacaaaaattagccaggcatggcagcgtacgcttgtaatcccaactacctgagaagctgaagcaggagaattgcttgaatccaggaggcggaggttgcaatgagcccatgcactccagcctaggtgacagagtgagactctgtctccaaaaaatatatatatatgtatatatacgtaaatacagttatttttatgtatatatatatatgaactgagctactgtaattacatgtaagaagttaagaagttatgatagtagatgatttttcatttatgtaactgatctatgtattgaggtctatacagacatgagatgtgaatagaaaaactgaccatgagctaaggccaaaaagcattaaaacaaaatgtttaagatatttaggtttaggtttttggttttttgagacagtcccactctgtcacccagggtggagtgcagtggcatgatcatagctcactgcaaccttgaactcctgggctcaagagatcctccctcccaacatgctgggataacaggcataagccaccacacttggtcttattttgtttttattacaggttgtagtaggctatgcttcatttttccatctgttgaatgggaaataaaaacacatacagccaatttgaataatgtttttgtttacattttataacttaaaaaatgtagggagaatttttaaactccctgtatgtttacagatatcctaagaaatacgaaagatgaaagacaagttatatgtttcattttacaactaaacagttcatgctctgcccacattgaaagtacgtactcttttgtagataaaaggtacagtcagtcctgctatacttgtttcaaaactgaattctaactcaattgatatattagggaaaaatttgagcatgaaataaatttcacatttgcttgtgtgtgatttcatctataagaagccttaggtaaaagcagaaaactgcacccagttgaactaaaccaggtatgaatagatggaatgcaccaacatcccccagctaccttagtgagcattaggtctttttcaccgtaaagtgccatattgtagtatttatctatttctcaaccatttaacatgtataaaactgttattattaggttcctgtttttgttttttaatgtggcactgaccaagtttttaaatgctgtgccctcactttccccaccagcctggggatttttagtgcgtgatttagcatagtgcagtgattttaggaaggcacttgttacattatagcagaactatgtttttatttcacttgacataaaatcataactgtgcctagatatttgtaccactggtactgttttctcttgagtccaagatcctgagactgaattctgttcattataaaacttaccaggactgtaatcccagcactttgggaggctgaggcaggcagatcatttgaggtcaggagttcgagaccagcctggccaacacggtgaaaccccgtctctactaaaaatacaaaaattagccgggtatggtggggcacacctgtaatcccagctactctggaggctgaggcaggagaattggttgaactcgggaggtggaggttgcagtgagctgagattgtgccactgtactccagcctggctgacagagtgagattctgtctcaaaaaaaaaattttttttgaggaaaaaattttcctcttttcctcaaaattaccaggaaaagcccgggtgtggtggctcacgcctgtaatcccagcactttgggaggctgaggcaggtggatcacctgagttcgggagctcgagaccagcctggccaacatggtgaaaccccgtctctactaaaaatacaaaaattagccaggcatggtgacaggcacctgtaatcccagctactcaggaagctgagacaggagaatcgcttgaacccaggaggtggagattgcagtgagccgagattgtgccattgcactccatccagcctgggcaacaaagtgagactccgtctcaaaaataaataaataaataaataaaattaccaggacaatgctatttgtatatgataaaatatacaaatttttggatagtgtttattttaagcaaatggaaactacaagattagtatacaaatgagtgctaatgttctagacctgttcactttagtacagtagctactagccacatgtggctatttaaatgtaaactaaataaaatgtaaaattcagttcctcaatcacgaggaaccaatgtggctaatgcctattttattggacagcgacagatatagacattttcatcaatgcagaaaattttaatgggcagtgctgatttagagaaattgaaaagcatttcctctagtcaaatcaatttgtattaaatcagtattttgttatatatctataattacattccaactgtttcatacataaaaaaagatatatataattttccaaatttttattgtttcctgaattcatataagtcagtttttcagaatttttataaggtttgaaaataatatagatctgctttcctgcatgttctttgaaaccctatgaacctgaattcatataaattcctctaaattaaagaaaatatatgcttactctaatataaccctctatttagtcatttgaaaacataatttaagtgtaaatgtatgattttatgcaggtttgcagaccggggacacagtgtagttggtgtggaaatcagtgaacttgggatacaagaattttttacagagcagaatctttcttactcagaagaaccaatcaccgaaattcctggaaccaaagtatttaaggtttgttttgatttgggtaaataattgtatccatatccccacaaaagtttttctcagtgtgagtattatgaggataccattcatgtgtccgatggttcctatttagcacgcagattcactgtagatactatatagtataagaagcaagggcttaaaaatataggtgatagctacctaaataggtatagacatatgtatataaaagctgaggtcaaagcctctctgtactcaagcttttaggcttgttttatttttattaacacgcattttctgagaacccatcatgtgccagaccctgcctaagacattgaagagataaagataacacagcacacccccctcactcccacccctaaagaatctcttagtttaggagagaagagaaacagggacaaagctatttgtaatgcatggagctaagtgtaaagacacagggtattaagggaagagatgggagttacctgcccaacctggcggtgcttcctgaagcatggtgacagatagagctggaatcaggcagggcctgggtccatggtcttggacacctcgggaagatactacttaaatcacccatgaggcctcataggaagtgatttgaagggaagtagcctcctggcagagagacaggaggctatggcagtggtccaggaaagacatcatgaatccctgagcaaggagagtgatggggcatagagagtggttaggatggattaaagcaacatttacgatagacccgcaggattctgtgaccgaatgaggaccaaaggagcgatgagttcacatttctggctcagatgactggctggatggtcaagaataaatgagaagggcagaaagaatgaatctttttctagagatgatgagtttaagggacctgtggagtggtgaaggttttatgtctgaagcatggagtgaggtttgggctcaaaatgataggtttgggagtggtctttatgctgtgagcagaatgagccagtgtaaataaacaaacactacccaagtgggaacaagcagagagaatctggcagagactcaaaggcaggcagaggagtggggaagcttaaaagtggacaaaagtaaaagctcccggcatgtgctgttgcgaggctgttggcacagggaagctggaggtgggcaactaggaacggggcatcctatgtgattggtttggggagcatgtttgcctttctctggctgatcctaaattggaagaagtgtggtagtaaaaatcagggaagctggcagtcattgaccaagtcactgcagaggttgtgaagtggctaccttgtctggggtaaattccccaggttcgtcgtcttgtgccaggaaaatttaggacagagacacacatgaggagttcaggagtggaggtttaataggcaaaaaaaaaagagaaagagaaaataaaacagctctctctttagtgagagagaggggacttccgagaggaaaaaacctgccaggtgtagaagcgccggattttatagtgcagcctgaggagtcagtgtctgatttacatagggctcacagattggtttgatcaagtgtgatgtttacataacgtgctgggaaggctggtcgccccaccctaatcttattatgcaaatgaactcttcccttcgctggcaccatgttgtctgcttcttactctacaggtggctgacagagaagggaagatagagccaccattttgaacatgattggcacaaactgccggcatctatgtctgcagctcgattttataggctgctctttgttagaaaggaaaaatgatttgaggctgcttttcattaagaggaaaaccttccgtatcctccctatctgccttagtaatttcttcttaactcctgaatcagttgtggggtcagagttgtattgtcatataggatctattgtccatctgtatattcagtgtctcacaaagtactcttttctaaatattgaaattaattgctcagctgggcatggtggctcatgcctgtaatcccagcactttgggtggccaaggtgggtggatcacttgaggtcaggagttcaggaccagcatggccaacatggcgaaaccccatctctactaaaaatgcaaaaattagctggctgtggtggtgcatacctataatcctagctactctggaggctgaggcaggagaatcgcttgaacctgggaggtggaggttgcagcgagccaagatcgcaccactgcactccagcctgggcaagagagtaagactctgtctcaaaaaaaaaaaaaaaaaattgttgctcagatcagtaggaagcttgatggtattttttatttcacatcttcctcccacctcattctcaaagcattaaagaatccaaggagtttactcagtccaaaaagggctagtcctgcttccaggcccctcttggagcagcagttccccgcccaggctgcacatttgaaatcatctctggatcttataaaaattcccaatccaaaggtcttaccccaggccaattatatcagaatctataggggtagggccctggcatcagtactgtttaaagctccccttgattccaatctgcaggcaaagttgagatccagctgttctcctgcctccaggcccacccatctctgggctgacccagtgatcccaggctggttgtcaaagacccttcctcctctacttgtaaacctgtgtggggacctcatttcagaataaaatctagcagtcttgtgtgctgacacacctttcctacactgcccttcaccccagctcccaggatcctaaagtctatgttatattgccccctcttggagtgtgcccccagtccacaccctagagtgtcaccctttcaaaagtcacctctttttttgttttattctcttgatttttgttgttgttgtttattttttaggattattttgctccaagtgtttgtttttgagacagggtcttactctcacacaggctggagggcagtggcacaatcacagctcactgcagccttgacctcccaggctcaagtgaccctcgcatgtcagcctcccaggtagctggaactacaggtgtgtgccaccacacccatctaattttttctgtagagttggagttttgccatgttgcccaggctggtctcatactcctgggctcaagcgatctgcctgcttcagcctcccaaagtgctggaattacaggtgtaagctgccacacctggccaaaagtcaccttttgtttagtctccctgatgctcccaggcaggcccctgctctgccttctgtgttcacatagttcgcaggcacagaaccacaacagagcaggccattctggattgtaatgttctctgtgcccacgcttctctgctctagtctgtcctcactgtggtcagagactgtgtcgaattcaaatctactgtcaagaacccaggatagatgtcttgtctattaggtactcagcaaataaatgctcattggctgaatgaatgagcaaaaatggaagaatcagcacaattgcacatttctggaataacttaaaatacctgacttttcagtaccaccctgcctgataattggttgacctgcagatttatctttagcagagtaaaaatatcactctgctcgaggaaacattgttagaattttatagcaagctctgaagtgagtaacagccaactgatcttcaaagttgtcctctgtgatattcctctgagttggcccaaaagaacctcgcacaggttttaaaagaaaaaaataaggtgccaataaagtgcagtaaaattatttactttaattatgtttaattaacacattctttccctagaacttttgctttgcttggccctctttccttgactattcaagtacttactaagtaaaaaaaaaaaatttttttttcattatttcattacagagttcttcggggaacatttcattgtactgttgcagtatttttgatcttcccaggtaggttgaatactacatctgcactttaaaaaatttgaatgcttgccaggcagtgcaggcatgggagtggaggtgtcttcctcactctcttcctcctgtgtaacatccacaaagcatttttttgaatgtctgttctgcagatatttttattacacactcgtctgcacactttaatgtgttttgtctttggttagctcccaaactatgggaaactgaggcagctagggaaaaagaaaggtgagtaagacagtgtcttctaccttgcacctgggcctgtaatagaaatgaatttcaagtagccaagggagataagagctcatctcctgaaagtccctgatacctgagccagaggctgggggcagagttgttgcacactgtcctttgttccttcttcatgtccccaaatcataacagagtggggaggctgctgccacaggctcctaaaaccatgaggggatggacagctctccacacccaggtccacacattcctctaggaggaaacgcagacgtgagatcctaataccttgacgattgttgaagtaccagcatgcaccatgggggacgctgctcatcttcttaaagatttgatttttctcccataaaatgttttttctctttctggtaggacaaatattggcaaatttgacatgatttgggatagaggagcattagttgccatcaatccaggtgatcgcaaatggtaagtaatttttctttttttgtttagctgtcttaattttttagtatactatactttttctgggttctagaaaatcagcttagacttctatgagtttgaaataggttattatgtttggaatttataaaaacctaaatccaatactagctttgtctaaaaagtataggatttgactacagagacctgggtgtaaggctataaggcttgtggctcaatcactttcaagctgtgtggccttggtccaagtattcaacttctctaagctttggtttactcctgcaaaatgggaatatttctgtaatactaacacaatcatcaccacctccactaatattaccaggtaatacttactggtcacttgcctattccaggtattgttcaaaatactttatgtgggctgggtatggtggatcatacatgtaatcccagcactgtgggaggccaaagcaggaggattacttgagcccaggagtttgagaccagtctgggcaacaaagcaagacgccacctctacaaaatatttttaaaattatccgaccgtggtggtatgtgcttgtagtcccagctacttgggaggctgaggcaggagggtgagcccagaagttcaaagctgcagtgagctatgatcgtaccactgcacttcaacctgaatgacagagcaagaccttgtctgtaaaatatttaaaaaaaaaaaaaaacaaaaaaatcaaaatatttcatgtggtttaacatttaattctgtaaggtataagctactattccattatacagatgaggaaactgaggtcaaagagattaagttacttgtccaaagttaagcagctggtatgtgacagagttgagattcaaaaccagagtgtttggctttgaagtccatacttgtggccgggtgtggtggctcacgcctgtaatcctagcactttgggaggccaaggtgggcggatcgcctgaggtcaggagttcgagaccagcctggccaacatggtgaaaccccatctctactaaaaatacaaaaatcagcccaatgtggtggcctgtaatcccagctactcaggaggctgtggcaggagaatcacttgaacccaggaggcagaggttgcagtgagccaagatggcgccattgcactccagcctggacgacaagagcgaccctccatttcaaaaaaatgaaataaaataaagtccacactcatgatccctttgttagactacctcaaaggatttttgtgggaattgaaagaaatgaaatatgtaggaaataccttgtcatctctaaagaactgtataaatgagagctgttattattgaagcattgttattgatgtttttgatgaccattcttattataccgagtcttgttagaaaataaaattaaaatatgagtgaggaagcatactgagtaaaatgtgaccacatctgtatactctttcaattaaaataatgtcatttatgtgcttacttggatatagcatggaaatattgaattacttagttgtatggagcagactcatcacttggccaaaaaggaggctgggcgcagtggctcacgcctgtaatcccagcactttaggaggctgaagtgggtggatcatgaggtcaggagttcgagaccagcctggccaacacagtgaaaccctatctctataaaaatacaaaaattagctgggcttggtggcgcacacctgtagccccagctacttgggaggctgaggcaggagaattgcttgaacccggcaggtggaggttgcagtgagccgagattgtgccacggcactccagcctgggcaacggagtgagatttcatctaaaaaaacaaacaaacaaccaaaaaaaaaacaggttaggctccacatcagtgaaataagatttttatttttaaaaattgtttcatcagtaaggcttactgccaaacctaatctttttaaattagaccatgccgcatcttaattttcatgctcctgtttccctctttttctcactgctcctcctttatctcttttccagaactcccatcctccttgcatgcctaaaagtcgtgattccccaagggaccaccatcctcagccttatgctctcacccaaaaattgccaatatttgtcctaccagaaagaaaaaaaaattttatgagagaaaaatcaaatcttttttttcgagacagagtttcgctcttgttgcccaggctggagtgcaatggcactatctcggctcaccgcaacctctgcctgccaggttcaagcgaatctcctgcctcagcctcccaggtagctgggattataggcatgctccaccacacccggctaatttttttgtatttttagtagagacggggtttctccatgttggtcaggctggtctcgaactccggaccccagctgatccacccgcctcggccacccggtgctgggattagaggtgtaagccaccacgcctggctgaaaaatcaaatctttaaagatcaattctgttactttcattcagctattcaacaaatatttactaagttcctgtgatgttccaaatagatagtatgccagaggcggggcaagtaactgaacagattatacatggtattcgctctgacagtctttacatttccagctctgttctttctcccaaacatccacatcacatgtccagtgtctgctttgcacttcccatgtgacatcagtgtcctttaacaactcaaaatatcaccgagacctctgtctccgtgagacacatttgtatatgaaaccccatctgctaatgtctaaatttgtaggtgtttcccactccctgaagatgatcatccattccttagaggttagtccttctacaggctctggttggcatggtaaaatccaccaagcagtgggaagcaaactaaaagtcaccacgtgcagaccaagagcggacccagcactttgggaggctgaggtgggcagatcacctgaggtcagttatttccccagtgtctgatataatatatatttagcacctagtaagagcttaataaatgttgtttaaataaatgaatggaagaagtgaactgcactctgagcaagggcgatattagtttactatgtactggtagtatcttagggtttttttttgagatggagttccactcttgttgcccaggctggagtgcaatggcatgatctcggctcactgcaacccctgccttctgggttcaagtgattctcctgcctcagcctccagagtagctgggattacagtagcgccaccacacccagctaattttgtatttttactagagacggggtttctccatgttggtcaggctggtctcgaactcccgacctcaggtgatctgcccacctcggcctcccaaagtgctgggattacagatgtaagtcaccgtgcccagccttatgttagtattttatatatgtgctggtacttagtatcttagttctttatctacatgctggtactcagtacttaccatgttagcacattatattggtgctttcgttaggactgggtgtcttctccttagattgtacattgtcaagtactgatgtattttctgctgtgactctcgagttcttgcctaatgtaaaccagtagggcagacctcatttttctggactttttgagactggttgagagagaaaaacttcacattctaagaggaatgaagtctttcagtcctaggaaaccctaccaaaccagtctgacatccccctcatggggacagcaagtttcttctgaaaaatgagaatcagaaagtaacagtttctgttcaaaagtttgctttgatgtggttctttcacctacaaggaagagtgatccactggtgaattctcacagtttgtgaggtggttattagtcttatcctcatgttacaggtgaggaaactgaggtacagaaaggttaagaatttgtcaagcttacatagccagtcagtagaggagctggggtttgagcctgggcatctcatagagtctgcacttgcctccccaacttctggcagacctctggacatagatcacagtctagccaggctccatagaaactggagtgccaagagcccaggctccttcctcagtgtggggaagggtgtccatctttgtccttggcctgtctctcatggcctctctaccaccctgcatgcgtctcctgtcctctccttatccctcagcttcctccatttttattcccacatagctgacttgccttcaacggtcagcctccttgctccaaccaccatacaatacaaaagctccaactttcagtaggaccacagctaattagcaattcctctttggtctcttaattcagtttccaagtcagtcatctgattggtcaactcatcgtctgtacctggtccagccctggcttctgctcagtctattgatgggtcctgttagcatcagcttcccactctgagccaatcagacctggctccctgaggcacctactcaaaggacagttccattgcactcatggtttatgccacacttgcagagctttaatttcatgccacctttttttggcctgcttgttactctcatttctaactaaatagaggaaaaaaattgtgttttctcttacataaggcccctggaggggtcccagtcacccaggatatttgttaaattgcagcatcccaggccccatggcaaactaactgcatcggtctgtggggatggagctcaggcatcttttctttcaacaagcaccccagtgattttgacacccagcctggtctagaaaccactgtcctcaagcacacaggcatccaaggtcagcaggccctcgagtacctcatcaggccagaaggagtctctacccatccttatgtaatgtcttctgctctgatcagctctggaagcaggcctcgatttgattcccatctggaccaattcccagcttaggcaggggccataatttgctaaacccatttctcacttttaaaatgagaatcaacctcttgtgattattaggagaatttaaactcagtagtatcagcgaaagtaacttctggcttccttccctgccttttgtccctccagcctttgcctgtgtagagaaatgtaacaaataccttcttgtgttctttgtagctatgcagatacaatgttttccctcctgggaaagaagtttcagtatctcctgtgtgttctttcttatgatccaactaaacatccaggtaaagttgttgggttttttttttttcttttaccagttgcctagtttcttgatataaattctatgacatggataagaattattttctcctaatttatctcataggaagcatactgcatatatacatggagataattccagttttgactaatgggaactataagcatgtttttctcttctatattgtacatgattttcttgtattcctttcccattttgtttaccattcacaattcagactagagaagagcggggaaatggatgatcctgatacagaagagaaatctcatgagtcctattgggaagaaggaggaatgtggttggatattgcatatccgtatcacccaagtggtagtgatgtgttggacagatgccttcacatacacaagcacggggtgagaagtgaatatggggatgcagaagttgtgcaggaaaaactctaaattattgtccttttttaatttctgaagttttataatctatctattgcattcttttatttgttttgaatctgttgggggtatgttttctcctggactcattttaatgcattcaaacattgaaacttaacctttgtcatggctggagaaatacatagacttttaatttgtaagagtcacctttttgattttcaactgagctttttaacatgcttgttttgtaaatatttacatatgttagtattttggtttttttgttttgttttgtttttgagacacagtctcactctgtggcccaggctggagtgcagtggtttcatctcggctcactgcaacgtccgccttccgggttcaagtgattctcctgcctcagcctcccaagtagctgggattacagtgtatgccatcacacccagctaatttctgtatttttagtagagacaggatttcaccatgttggccaagctggtctggaactcctgacctcaggtgatccgccctcctcagcctcccaaagtgctgggattacaggcgtgagccaccgttcccagctagtattttgtttctgcttgaataaattggggtcttaaaaactcattaaaagatgagacctagtgtccctaattaaatcagagacaatcaaatggaaatagaaattaatagaggcagaagttagctctgctaatctgatttaaattccattaatgaacagaagccctaacaaagaacctttgggaagaaaatacagcaggccctgtctggaggtggagtctgaggatactgctcttagaagggggcggaagctcagcttccttatactctatatcctgcagcagagcgggaggggtgtataaaatgtgggtgagtgcaggagttggtagaaaatcagtatgctagaagatggttgaaacccccaaggaatctgctgatggaatccactctgatttcaatgagcctaagtcccttgaccggtttagctgtctcatctaagctaaagatggatatgatggggatgtaacattgccatcctctcagtaagtcaatttatttctttagtatgagatttgcaaaagaagaatgagaagaacatgccacatcatcacctatttggataatgaagttgtatgtagaacaagtacacctacgtcattggaaataaactcagaatttatttctcttttacctaggtccaccattttatgttccacatgctgaaattgaaaggttgtttggtaagtttgtggacttatgctgtaactttttaaacaaagtcaagttaactcttttgggcctggcgtgctggctcatgcctgtatttccagcactttgggaggccaaggtgggcagatcacctgaggccaggagttcgagaccagcctggccaacatggcgaaaccctgtctctacaaaaatacaaaaattaggccagtgtggtggcatgtgcctgtagtcccaactatttgagaggctgaggcatgggaattgcttgaacctgggaggcagagagtgtagtgagccaagattgtgccactgcactccagcgtgggtaacagagtgagactccatctaaaaaaaaaaaacctattgtgaactattagtatattagtatctagagtatgtctataaaatttaaaagataaagaccattttattgaaagttgttttatcttagaaaaggaactaatctctgtaaatatgctctgtatatatgctatatgctctatgttaaaggtatttgaacttttctagagagatggtatatttttttttatttgtttatttttgagataggatcttgatctgtcacccaggctggagtacagaagtgcaatcacagctcactgcagcctcgacctccctgggcacaagtgatcctcccacctcagcctcccaagtttctgggaccagaggcatgcaccacaatgcttagctaatttttctatttttttgtagagatggggtttaaccacattgcccaggctggtctcgaactcctgggctcaagtgatcctcttgtcttggcctcccaaagtactgggattagaggcatgagccgccatgcccagtggtgtatttatttttactcttgggagttaaaagtgataataacaattcagagttcaggaaatttgcccttagcattcctctgttttgattaaaaagaagagaaaaatgtttagtgtacactgtttttaaaataatttcaaggttttgtttgtttgttttgagatggagtttcgctcttgttgcctaggctagagcgcgatggtgcaatctcagctcactgcaacctccatctcccgggttcaagcgattctcctgcctcaacctcccaagtagctgggattacaggcatgtgccaccatacccagctcattttgtatttttagtagagacagagtttcaccatcttggccaggctggtcatgaactcctgacctcaagtgatccacctgcctcggcctcccaaagtgttgggattacaggtgtgagccaccgcacccagccaattttgagtatttttaaaagaatccctgatgtcattcttcatagtattttaacatgttactctttcttgtttcaggtaaaatatgcaatatacgttgtcttgagaaggttgatgcttttgaagaacgacataaaagttggggaattgactgtctttttgaaaagttatatctacttacagaaaagtaaatgagacatagataaaataaaatcacactgacatgtttttgaggaattgaaaattatgctaaagcctgaaaatgtaatggatgaatttttaaaattgtttataaatcatatgatagatctttactaaaaatggctttttagtaaagccatttactttttctaaaaaagttttagaagaaaaagatgtaactaaacttttaaagtagctcctttggagaggagattatgatgtgaaagattatgcctatgtgtcttgcagattgcaagatattttaccaatcagcatgtgttacctgtacaattaaaaaaatatttcaaaatgcaatgcatattaaatataatacacacagaaaaactggcatttattttgttttatttttttgagatggagtttcgttcttgttgcccaacctggagtgcaatggtgcaatctcagctcactgcaacctctgcctcccaggttcaggtgattctcctgcctcagcctcctgagtagctgggattacaggtgtgcgccaccacgcccagctaattttttgtatttttagtagagacagggtttcaccatgttggtcaggctgatctcgagctcctgacctcaggtgatctacccacctcggcctcccaaagtgctgggattacaggcgtgagccactgcacctggcctgacattctttatgaaatttagaattgttgaagaactataacatttcagtagggttcaaggtggtcccaaaagttatataaaagattagtttttactataaacccttgtcttttactcagatcctagcatcccttttcacatggtttctccatgtatataacagaatcaagaaacaaattttaattaaacaatctgtaacagaatcaagaaacaaatacattttaattaaacaatctatatggaacaaacattcccaaattctaagaataaatttttctttaagttttctctgagtttggcaattgttgttttttataatttaatctgtttaaatcatcaggtcttataaaatataatgtacttagagctggattcatggctgtttattatgaaaggttagatttctcagttcttctttaaccacattttgttatatcagacagtcctctataactctgtactacccaacaactaaatggtttagattgtttagctcatgttaataggatggttgtgtattataaaaaacgagttacgtgtgtgtgtgcacgcatgcacgcacatgtgctggcttaaaggttgttaatgcaaggtttggggtcccctttaacactggtgaaagctacggtactctccccagagatatgtcttgtcagcctctctagttccccttggcctgcatgtacaaacttctaccctagaagctctctgccatcgatgtattctaatagatttgtaaggctattaatttgaagcaactccttgctcacagtgattcttgcttctctgagacctgctcccagtcgatactgtgggcttcagaagccatgactccccaactctgcctgtatcaccggttgaatggacaactaacccgagctggaccaacacaattctctccagagacttttgattttacttttatgtagagacagggtctcactttgttgcccacgctgatgttgaacttgacgtgaggcctcaagcagtcctcctgtcttggccacccaaagtgctaggattacaggtatgagccattgcgctggccctcttcataggcttttggacttgggaatagaaaagcaaccccgtctctactaaaaatacaaaaaaattagccaggcgtggtggcacgtgcctgtaatcccagctacttgggaggctgaggcaggagaatcacttgaacctaggaggcggaggttgcagtgagctgagatcatgccactgcacgcaagcctgggcaacagagcaagactctgtctcaaaagaaagaaaaagaaaagaaaaaaaagaaaggcaagttgactgctgaaaggggaatctgtgtacgcctgggagctgtggggcagccacattccagcacatggatctgagaaacagaacgctgatctgcagaaagagatgagaaccaaagagaggccacctgcgtcctgggtccattttcatcctccctgaagcccagctgcccagggtggggagaaacaccctgtgtccatgggatagagtcctttccgcttgcagttgtgcccaaagaatcttaaatacaaatgagatatccttaggtagttgatcatttatgtaatatgtgtcttcactggggaatactgacttcctaaaatctcaagatggaagatataccacatgtaaattattttagagcaattaaattgttttcaggattttccaaaaa

SEQ ID NO: 4 - DNA, 21 bp, Artificial Sequence
  source: /note="Description of Artificial Sequence: Synthetic primer"
cagaggagcccatttggtagt

SEQ ID NO: 5 - DNA, 18 bp, Artificial Sequence
  source: /note="Description of Artificial Sequence: Synthetic primer"
ccagcctgtggtttcacc

SEQ ID NO: 6 - DNA, 19 bp, Artificial Sequence
  source: /note="Description of Artificial Sequence: Synthetic primer"
ggactacggtcatcaccca

SEQ ID NO: 7 - DNA, 18 bp, Artificial Sequence
  source: /note="Description of Artificial Sequence: Synthetic primer"
gcttgacaagaggccctg

SEQ ID NO: 8 - DNA, 19 bp, Artificial Sequence
  source: /note="Description of Artificial Sequence: Synthetic primer"
ggctaatgccttcatggcc

SEQ ID NO: 9 - DNA, 18 bp, Artificial Sequence
  source: /note="Description of Artificial Sequence: Synthetic primer"
gcaaatcctgctcttccg

SEQ ID NO: 10 - DNA, 23 bp, Artificial Sequence
  source: /note="Description of Artificial Sequence: Synthetic primer"
gtacctcctatccacgtcagaga

SEQ ID NO: 11 - DNA, 18 bp, Artificial Sequence
  source: /note="Description of Artificial Sequence: Synthetic primer"
catcccggcagagaacag

SEQ ID NO: 12 - DNA, 21 bp, Artificial Sequence
  source: /note="Description of Artificial Sequence: Synthetic primer"
cctgacctcctccaacatagg

SEQ ID NO: 13 - DNA, 18 bp, Artificial Sequence
  source: /note="Description of Artificial Sequence: Synthetic primer"
cacccaagtggggacagt

SEQ ID NO: 14 - DNA, 20 bp, Artificial Sequence
  source: /note="Description of Artificial Sequence: Synthetic primer"
cttccccaagtaccaaggca

SEQ ID NO: 15 - DNA, 27 bp, Artificial Sequence
  source: /note="Description of Artificial Sequence: Synthetic primer"
gacatacatatacccacaaacccacac

SEQ ID NO: 16 - DNA, 20 bp, Artificial Sequence
  source: /note="Description of Artificial Sequence: Synthetic primer"
actcctgcactcacttgcaa

SEQ ID NO: 17 - DNA, 22 bp, Artificial Sequence
  source: /note="Description of Artificial Sequence: Synthetic primer"
aatctgttgcagtggacatttg

SEQ ID NO: 18 - DNA, 19 bp, Artificial Sequence
  source: /note="Description of Artificial Sequence: Synthetic primer"
tgaagtaccagcatgcacc

SEQ ID NO: 19 - DNA, 20 bp, Artificial Sequence
  source: /note="Description of Artificial Sequence: Synthetic primer"
gagccacaagccttatagcc

SEQ ID NO: 20 - DNA, 20 bp, Artificial Sequence
  source: /note="Description of Artificial Sequence: Synthetic primer"
gctgacgttactgacgtggt

SEQ ID NO: 21 - DNA, 20 bp, Artificial Sequence
  source: /note="Description of Artificial Sequence: Synthetic primer"
caggcggcctttagtgatga

SEQ ID NO: 22 - DNA, 50 bp, Artificial Sequence
  source: /note="Description of Artificial Sequence: Synthetic oligonucleotide"
ttctcagaatttctgaaaggttacttcaaggacaaaatacctgtattcct

SEQ ID NO: 23 - DNA, 50 bp, Artificial Sequence; identical to SEQ ID NO: 22
  source: /note="Description of Artificial Sequence: Synthetic oligonucleotide"

SEQ ID NO: 24 - DNA, 50 bp, Artificial Sequence; identical to SEQ ID NO: 22
  source: /note="Description of Artificial Sequence: Synthetic oligonucleotide"

SEQ ID NO: 25 - DNA, 50 bp, Artificial Sequence
  source: /note="Description of Artificial Sequence: Synthetic oligonucleotide"
gagggaggggcctcttggtgctgacctgtcctgttgtatgtgtcacagca

SEQ ID NO: 26 - DNA, 50 bp, Artificial Sequence; identical to SEQ ID NO: 25
  source: /note="Description of Artificial Sequence: Synthetic oligonucleotide"

SEQ ID NO: 27 - DNA, 50 bp, Artificial Sequence; identical to SEQ ID NO: 25
  source: /note="Description of Artificial Sequence: Synthetic oligonucleotide"

SEQ ID NO: 28 - DNA, 50 bp, Artificial Sequence
  source: /note="Description of Artificial Sequence: Synthetic oligonucleotide"
aaggggtctgcagggacactgccacccactaggcacccccgacaccagcc

SEQ ID NO: 29 - DNA, 50 bp, Artificial Sequence
  source: /note="Description of Artificial Sequence: Synthetic oligonucleotide"
ccggcttggatgtcaaggccctcagagccttccgagtgctcagacccctc

SEQ ID NO: 30 - DNA, 50 bp, Artificial Sequence; identical to SEQ ID NO: 29
  source: /note="Description of Artificial Sequence: Synthetic oligonucleotide"

SEQ ID NO: 31 - DNA, 50 bp, Artificial Sequence
  source: /note="Description of Artificial Sequence: Synthetic oligonucleotide"
atcattacaggtcatgtagcatttaccacagttgatacacatttcttcaa

SEQ ID NO: 32 - DNA, 50 bp, Artificial Sequence
  source: /note="Description of Artificial Sequence: Synthetic oligonucleotide"
ggaacatttggtgaattgagcaacgtagagcaagttgtggctatgattgt

SEQ ID NO: 33 - DNA, 50 bp, Artificial Sequence
  source: /note="Description of Artificial Sequence: Synthetic oligonucleotide"
atattggtgtcaaagtgtcactgaactaaaggctgactttccagacaaca

SEQ ID NO: 34 - DNA, 50 bp, Artificial Sequence
  source: /note="Description of Artificial Sequence: Synthetic oligonucleotide"
ttcaccaacttatgccaattctcttgttttagatgttaaatcacacttat

SEQ ID NO: 35 - DNA, 50 bp, Artificial Sequence
  source: /note="Description of Artificial Sequence: Synthetic oligonucleotide"
attcaccaacttatgccaattctcttgttttagatgttaaatcacactta

SEQ ID NO: 36 - DNA, 50 bp, Artificial Sequence
  source: /note="Description of Artificial Sequence: Synthetic oligonucleotide"
gaaagttttggtgagggcaaaaccccatccagcttcaaaagctcttcgaa

SEQ ID NO: 37 - DNA, 50 bp, Artificial Sequence; identical to SEQ ID NO: 36
  source: /note="Description of Artificial Sequence: Synthetic oligonucleotide"

SEQ ID NO: 38 - DNA, 50 bp, Artificial Sequence
  source: /note="Description of Artificial Sequence: Synthetic oligonucleotide"
aatccttttggtcttgctagcgcaactccagccaccagcacatcaatgat

SEQ ID NO: 39 - DNA, 50 bp, Artificial Sequence; identical to SEQ ID NO: 32
  source: /note="Description of Artificial Sequence: Synthetic oligonucleotide"

SEQ ID NO: 40 - DNA, 50 bp, Artificial Sequence
  source: /note="Description of Artificial Sequence: Synthetic oligonucleotide"
gttatagtaaaaggtgggagaattgttgctatgcagtttgttcggacaga

SEQ ID NO: 41 - DNA, 50 bp, Artificial Sequence; identical to SEQ ID NO: 40
  source: /note="Description of Artificial Sequence: Synthetic oligonucleotide"

SEQ ID NO: 42 - DNA, 50 bp, Artificial Sequence; identical to SEQ ID NO: 40
  source: /note="Description of Artificial Sequence: Synthetic oligonucleotide"

SEQ ID NO: 43 - DNA, 50 bp, Artificial Sequence
  source: /note="Description of Artificial Sequence: Synthetic oligonucleotide"
gttttagcaaacgattttttttttcaaatttgtgtcttctgttctcaaag

SEQ ID NO: 44 - DNA, 50 bp, Artificial Sequence; identical to SEQ ID NO: 43
  source: /note="Description of Artificial Sequence: Synthetic oligonucleotide"

SEQ ID NO: 45 - DNA, 50 bp, Artificial Sequence; identical to SEQ ID NO: 43
  source: /note="Description of Artificial Sequence: Synthetic oligonucleotide"

SEQ ID NO: 46 - DNA, 50 bp, Artificial Sequence
  source: /note="Description of Artificial Sequence: Synthetic oligonucleotide"
aaggagaagcaaacatgagagacagagcacaaggaccacaaaaggatcca

SEQ ID NO: 47 - DNA, 50 bp, Artificial Sequence; identical to SEQ ID NO: 46
  source: /note="Description of Artificial Sequence: Synthetic oligonucleotide"

SEQ ID NO: 48 - DNA, 50 bp, Artificial Sequence; identical to SEQ ID NO: 46
  source: /note="Description of Artificial Sequence: Synthetic oligonucleotide"

SEQ ID NO: 49 - DNA, 50 bp, Artificial Sequence
  source: /note="Description of Artificial Sequence: Synthetic oligonucleotide"
tggggccaggagggagttttcctctcccagagctctgtctccagattgaa

SEQ ID NO: 50 - DNA, 50 bp, Artificial Sequence; identical to SEQ ID NO: 49
  source: /note="Description of Artificial Sequence: Synthetic oligonucleotide"

SEQ ID NO: 51 - DNA, 50 bp, Artificial Sequence
  source: /note="Description of Artificial Sequence: Synthetic oligonucleotide"
tagggccaggagggagttttcctctcccagagctctgtctccagattgaa

SEQ ID NO: 52 - DNA, 50 bp, Artificial Sequence
  source: /note="Description of Artificial Sequence: Synthetic oligonucleotide"
tcatgtttgcttctcctttcaatctggagacagagctctgggagaggaaa

SEQ ID NO: 53 - DNA, 50 bp, Artificial Sequence; identical to SEQ ID NO: 52
  source: /note="Description of Artificial Sequence: Synthetic oligonucleotide"

SEQ ID NO: 54 - DNA, 50 bp, Artificial Sequence; identical to SEQ ID NO: 52
  source: /note="Description of Artificial Sequence: Synthetic oligonucleotide"

SEQ ID NO: 55 - DNA, 50 bp, Artificial Sequence
  source: /note="Description of Artificial Sequence: Synthetic oligonucleotide"
agctctcaaaaatctatggccctgtgttcactctgtattttggcctggaa

SEQ ID NO: 56 - DNA, 50 bp, Artificial Sequence; identical to SEQ ID NO: 55
  source: /note="Description of Artificial Sequence: Synthetic oligonucleotide"

SEQ ID NO: 57 - DNA, 50 bp, Artificial Sequence
  source: /note="Description of Artificial Sequence: Synthetic oligonucleotide"
atcaatcagggcttccttcaccacttcatatccatgcagcaccaccatgc

SEQ ID NO: 58 - DNA, 50 bp, Artificial Sequence
  source: /note="Description of Artificial Sequence: Synthetic oligonucleotide"
atggccctgtgttcactctgtattttggcctggaacgcatggtggtgctg

SEQ ID NO: 59 - DNA, 50 bp, Artificial Sequence; identical to SEQ ID NO: 58
  source: /note="Description of Artificial Sequence: Synthetic oligonucleotide"

SEQ ID NO: 60 - DNA, 50 bp, Artificial Sequence; identical to SEQ ID NO: 58
  source: /note="Description of Artificial Sequence: Synthetic oligonucleotide"

SEQ ID NO: 61 - DNA, 50 bp, Artificial Sequence
  source: /note="Description of Artificial Sequence: Synthetic oligonucleotide"
ggtggtgctgcatggatatgaagtggtgaaggaagccctgattgatcttg

SEQ ID NO: 62 - DNA, 50 bp, Artificial Sequence; identical to SEQ ID NO: 61
  source: /note="Description of Artificial Sequence: Synthetic oligonucleotide"

SEQ ID NO: 63 - DNA, 50 bp, Artificial Sequence
  source: /note="Description of Artificial Sequence: Synthetic oligonucleotide"
ttagctctttcagccagtgggaaatggcctcttccagaaaactcctctcc

SEQ ID NO: 64 - DNA, 50 bp, Artificial Sequence
  source: /note="Description of Artificial Sequence: Synthetic oligonucleotide"
ggtgaaggaagccctgattgatcttggagaggagttttctggaagaggcc

SEQ ID NO: 65 - DNA, 50 bp, Artificial Sequence; identical to SEQ ID NO: 64
  source: /note="Description of Artificial Sequence: Synthetic oligonucleotide"

SEQ ID NO: 66 - DNA, 50 bp, Artificial Sequence; identical to SEQ ID NO: 64
  source: /note="Description of Artificial Sequence: Synthetic oligonucleotide"

SEQ ID NO: 67 - DNA, 50 bp, Artificial Sequence
  source: /note="Description of Artificial Sequence: Synthetic oligonucleotide"
cacttgcacacctaccaaatcctctgttagctctttcagccagtgggaaa

SEQ ID NO: 68 - DNA, 50 bp, Artificial Sequence
  source: /note="Description of Artificial Sequence: Synthetic oligonucleotide"
catctctttccattgctgaaaacgattcctaacaggaagagaaacgaaac

SEQ ID NO: 69 - DNA, 50 bp, Artificial Sequence; identical to SEQ ID NO: 68
  source: /note="Description of Artificial Sequence: Synthetic oligonucleotide"

SEQ ID NO: 70 - DNA, 50 bp, Artificial Sequence
  source: /note="Description of Artificial Sequence: Synthetic oligonucleotide"
catcccaaaattccgcagcgtcatgagggagaaacgccggatctccttcc

SEQ ID NO: 71 - DNA, 50 bp, Artificial Sequence
  source: /note="Description of Artificial Sequence: Synthetic oligonucleotide"
tagtttcgtttctcttcctgttaggaatcrttttcagcaatggaaagaga

SEQ ID NO: 72 - DNA, 50 bp, Artificial Sequence; identical to SEQ ID NO: 71
  source: /note="Description of Artificial Sequence: Synthetic oligonucleotide"

SEQ ID NO: 73 - DNA, 50 bp, Artificial Sequence
  source: /note="Description of Artificial Sequence: Synthetic oligonucleotide"
caatggaaagagatggaaggagatccggcgtttctccctcatgacgctgc

SEQ ID NO: 74 - DNA, 50 bp, Artificial Sequence
  source: /note="Description of Artificial Sequence: Synthetic oligonucleotide"
cttcctcttgaacacggtcctcaatgctcctcttccccwtcccaaaattc

SEQ ID NO: 75 - DNA, 50 bp, Artificial Sequence
  source: /note="Description of Artificial Sequence: Synthetic oligonucleotide"
cttcctcttgaacacggtcctcaatgctcctcttccccatcccaaaattc

SEQ ID NO: 76 - DNA, 50 bp, Artificial Sequence; identical to SEQ ID NO: 75
  source: /note="Description of Artificial Sequence: Synthetic oligonucleotide"

SEQ ID NO: 77 - DNA, 50 bp, Artificial Sequence
  source: /note="Description of Artificial Sequence: Synthetic oligonucleotide"
cctcatgacgctgcggaatattgggatgaggaagaggagcattgaggacc

SEQ ID NO: 78 - DNA, 50 bp, Artificial Sequence
  source: /note="Description of Artificial Sequence: Synthetic oligonucleotide"
cagaaaggtcagtgatagagagtatgttccagcgggcttcctcttgaaca

SEQ ID NO: 79 - DNA, 50 bp, Artificial Sequence; identical to SEQ ID NO: 78
  source: /note="Description of Artificial Sequence: Synthetic oligonucleotide"

SEQ ID NO: 80 - DNA, 50 bp, Artificial Sequence
  source: /note="Description of Artificial Sequence: Synthetic oligonucleotide"
ttttgggatggggaagaggagcattgaggaccgtgttcaagaggaagccc

SEQ ID NO: 81 - DNA, 50 bp, Artificial Sequence; identical to SEQ ID NO: 80
  source: /note="Description of Artificial Sequence: Synthetic oligonucleotide"

SEQ ID NO: 82 - DNA, 50 bp, Artificial Sequence; identical to SEQ ID NO: 80
  source: /note="Description of Artificial Sequence: Synthetic oligonucleotide"

SEQ ID NO: 83 - DNA, 50 bp, Artificial Sequence
  source: /note="Description of Artificial Sequence: Synthetic oligonucleotide"
gttttcattcaatttttccatcaagttaagaaattgctgatctttataat

SEQ ID NO: 84 - DNA, 50 bp, Artificial Sequence; identical to SEQ ID NO: 83
  source: /note="Description of Artificial Sequence: Synthetic oligonucleotide"

SEQ ID NO: 85 - DNA, 50 bp, Artificial Sequence; identical to SEQ ID NO: 83
  source: /note="Description of Artificial Sequence: Synthetic oligonucleotide"

SEQ ID NO: 86 - DNA, 50 bp, Artificial Sequence
  source: /note="Description of Artificial Sequence: Synthetic oligonucleotide"
aacttgatggaaaaattgaatgaaaacatcaggattgtaagcaccccctg

SEQ ID NO: 87 - DNA, 50 bp, Artificial Sequence; identical to SEQ ID NO: 86
  source: /note="Description of Artificial Sequence: Synthetic oligonucleotide"

SEQ ID NO: 88 - DNA, 50 bp, Artificial Sequence; identical to SEQ ID NO: 86
  source: /note="Description of Artificial Sequence: Synthetic oligonucleotide"

SEQ ID NO: 89 - DNA, 50 bp, Artificial Sequence
  source: /note="Description of Artificial Sequence: Synthetic oligonucleotide"
tgttttctcttagatatgcaataattttcccactatcattgattatttcc

SEQ ID NO: 90 - DNA, 50 bp, Artificial Sequence
  source: /note="Description of Artificial Sequence: Synthetic oligonucleotide"
tatcactttccataaaagcaaggtttttaagtaatttgttatgggttccy

SEQ ID NO: 91 - DNA, 50 bp, Artificial Sequence; identical to SEQ ID NO: 89
  source: /note="Description of Artificial Sequence: Synthetic oligonucleotide"

SEQ ID NO: 92 - DNA, 50 bp, Artificial Sequence
  source: /note="Description of Artificial Sequence: Synthetic oligonucleotide"
atatcactttccataaaagcaaggtttttaagtaatttgttatgggttcc

SEQ ID NO: 93 - DNA, 50 bp, Artificial Sequence; identical to SEQ ID NO: 92
  source: /note="Description of Artificial Sequence: Synthetic oligonucleotide"

SEQ ID NO: 94 - DNA, 50 bp, Artificial Sequence; identical to SEQ ID NO: 92
  source: /note="Description of Artificial Sequence: Synthetic oligonucleotide"

SEQ ID NO: 95 - DNA, 50 bp, Artificial Sequence
  source: /note="Description of Artificial Sequence: Synthetic oligonucleotide"
aacaaccctcgggactttattgattgcttcctgatcaaaatggagaagga

SEQ ID NO: 96 - DNA, 50 bp, Artificial Sequence; identical to SEQ ID NO: 95
  source: /note="Description of Artificial Sequence: Synthetic oligonucleotide"

SEQ ID NO: 97 - DNA, 50 bp, Artificial Sequence
  source: /note="Description of Artificial Sequence: Synthetic oligonucleotide"
caacaaccctcgggactttattgattgcttcctgatcaaaatggagaagg

SEQ ID NO: 98 - DNA, 50 bp, Artificial Sequence
  source: /note="Description of Artificial Sequence: Synthetic oligonucleotide"
atcagttcttacttgtgtcttgtcagctaaagtccaggaagagattgaac

SEQ ID NO: 99 - DNA, 50 bp, Artificial Sequence
  source: /note="Description of Artificial Sequence: Synthetic oligonucleotide"
tcttacttgtgtcttgtcagctaaagtccaggaagagattgaacgtgtya

SEQ ID NO: 100 - DNA, 50 bp, Artificial Sequence; identical to SEQ ID NO: 99
  source: /note="Description of Artificial Sequence: Synthetic oligonucleotide"

SEQ ID NO: 101 - DNA, 50 bp, Artificial Sequence
  source: /note="Description of Artificial Sequence: Synthetic oligonucleotide"
ttcttacttgtgtcttgtcagctaaagtccaggaagagattgaacgtgty

SEQ ID NO: 102 - DNA, 50 bp, Artificial Sequence
  source: /note="Description of Artificial Sequence: Synthetic oligonucleotide"
gatacatcgacctcatccccaccagcctgccccatgcagtgacctgtgac

SEQ ID NO: 103 - DNA, 50 bp, Artificial Sequence; identical to SEQ ID NO: 102
  source: /note="Description of Artificial Sequence: Synthetic oligonucleotide"

SEQ ID NO: 104 - DNA, 50 bp, Artificial Sequence
  source: /note="Description of Artificial Sequence: Synthetic oligonucleotide"
agttacacatgaggagtaacttctccctatgtttgttattttcaggaaaa

SEQ ID NO: 105 - DNA, 50 bp, Artificial Sequence
  source: /note="Description of Artificial Sequence: Synthetic oligonucleotide"
tactgatagtgtacaatgattcaggatttcgtaattcagtctagtaaatt

SEQ ID NO: 106 - DNA, 50 bp, Artificial Sequence
  source: /note="Description of Artificial Sequence: Synthetic oligonucleotide"
aaggagaagcaaacatgagagacagagcacaaggaccacaagagaatcca

SEQ ID NO: 107 - DNA, 50 bp, Artificial Sequence; identical to SEQ ID NO: 106
  source: /note="Description of Artificial Sequence: Synthetic oligonucleotide"

SEQ ID NO: 108 - DNA, 50 bp, Artificial Sequence; identical to SEQ ID NO: 106
  source: /note="Description of Artificial Sequence: Synthetic oligonucleotide"

SEQ ID NO: 109 - DNA, 50 bp, Artificial Sequence
  source: /note="Description of Artificial Sequence: Synthetic oligonucleotide"
aggagtggggccaggagggagttttcctctcccagagctctgtctccaga

SEQ ID NO: 110 - DNA, 50 bp, Artificial Sequence; identical to SEQ ID NO: 109
  source: /note="Description of Artificial Sequence: Synthetic oligonucleotide"

SEQ ID NO: 111 - DNA, 50 bp, Artificial Sequence; identical to SEQ ID NO: 109
  source: /note="Description of Artificial Sequence: Synthetic oligonucleotide"

SEQ ID NO: 112 - DNA, 50 bp, Artificial Sequence
  source: /note="Description of Artificial Sequence: Synthetic oligonucleotide"
tttgcttctcctttcactctggagacagagctctgggagaggaaaactcc

SEQ ID NO: 113 - DNA, 50 bp, Artificial Sequence; identical to SEQ ID NO: 112
  source: /note="Description of Artificial Sequence: Synthetic oligonucleotide"

SEQ ID NO: 114 - DNA, 50 bp, Artificial Sequence
  source: /note="Description of Artificial Sequence: Synthetic oligonucleotide"
tacctatctgtaggatatttccaatcactgggagaggagtggggccagga

SEQ ID NO: 115 - DNA, 50 bp, Artificial Sequence
  source: /note="Description of Artificial Sequence: Synthetic oligonucleotide"
tacattggttaaggatttgctgatgtccttaatacctatctgtaggatat

SEQ ID NO: 116 - DNA, 50 bp, Artificial Sequence; identical to SEQ ID NO: 115
  source: /note="Description of Artificial Sequence: Synthetic oligonucleotide"

SEQ ID NO: 117 - DNA, 50 bp, Artificial Sequence; identical to SEQ ID NO: 115
  source: /note="Description of Artificial Sequence: Synthetic oligonucleotide"

SEQ ID NO: 118 - DNA, 50 bp, Artificial Sequence; identical to SEQ ID NO: 115
  source: /note="Description of Artificial Sequence: Synthetic oligonucleotide"

SEQ ID NO: 119 - DNA, 50 bp, Artificial Sequence
  source: /note="Description of Artificial Sequence: Synthetic oligonucleotide"
ttgcaagccactgaaggagcatacttacattggttaaggatttgctgatg

SEQ ID NO: 120 - DNA, 50 bp, Artificial Sequence; identical to SEQ ID NO: 119
  source: /note="Description of Artificial Sequence: Synthetic oligonucleotide"

SEQ ID NO: 121 - DNA, 50 bp, Artificial Sequence; identical to SEQ ID NO: 119
  source: /note="Description of Artificial Sequence: Synthetic oligonucleotide"

SEQ ID NO: 122 - DNA, 50 bp, Artificial Sequence
  source: /note="Description of Artificial Sequence: Synthetic oligonucleotide"
gcttccttcactgcttcatatccatgcagcaccactatgggtttcaggcc

SEQ ID NO: 123 - DNA, 50 bp, Artificial Sequence
  source: /note="Description of Artificial Sequence: Synthetic oligonucleotide"
gcttccttcactgcttcatatccatgcagyaycactatgggtttcaggcc

SEQ ID NO: 124 - DNA, 50 bp, Artificial Sequence; identical to SEQ ID NO: 123
  source: /note="Description of Artificial Sequence: Synthetic oligonucleotide"

SEQ ID NO: 125 - DNA, 50 bp, Artificial Sequence
  source: /note="Description of Artificial Sequence: Synthetic oligonucleotide"
ctctccaagatcaatcagggcttccttcactgcttcatatccatgcagya

SEQ ID NO: 126 - DNA, 50 bp, Artificial Sequence
  source: /note="Description of Artificial Sequence: Synthetic oligonucleotide"
tctccaagatcaatcagggcttccttcactgcttcatatccatgcagcat

SEQ ID NO: 127 - DNA, 50 bp, Artificial Sequence
  source: /note="Description of Artificial Sequence: Synthetic oligonucleotide"
tctccaagatcaatcagggcttccttcactgcttcatatccatgcagyat

SEQ ID NO: 128 - DNA, 50 bp, Artificial Sequence
  source: /note="Description of Artificial Sequence: Synthetic oligonucleotide"
tagctctttcagccagtgggaaaatgcctcttccagaaaactcctctcca

SEQ ID NO: 129 - DNA, 50 bp, Artificial Sequence
  source: /note="Description of Artificial Sequence: Synthetic oligonucleotide"
catagtggtgctgcatcgatatgaagcagtgacggaaggcctgattgatc

SEQ ID NO: 130 - DNA, 50 bp, Artificial Sequence; identical to SEQ ID NO: 129
  source: /note="Description of Artificial Sequence: Synthetic oligonucleotide"

SEQ ID NO: 131 - DNA, 50 bp, Artificial Sequence
  source: /note="Description of Artificial Sequence: Synthetic oligonucleotide"
cctaccaaatcctctgttagctctttcagccagtgggaaaatgmctcttg

SEQ ID NO: 132 - DNA, 50 bp, Artificial Sequence; identical to SEQ ID NO: 131
  source: /note="Description of Artificial Sequence: Synthetic oligonucleotide"

SEQ ID NO: 133 - DNA, 50 bp, Artificial Sequence
  source: /note="Description of Artificial Sequence: Synthetic oligonucleotide"
cctaccaaatcctctgttagctctttcagccagtgggaaaatgcctcttg

SEQ ID NO: 134 - DNA, 50 bp, Artificial Sequence
  source: /note="Description of Artificial Sequence: Synthetic oligonucleotide"
tgcacacctaccaaatcctctgttagctctttcagccagtgggaaaatgt

SEQ ID NO: 135 - DNA, 50 bp, Artificial Sequence
  source: /note="Description of Artificial Sequence: Synthetic oligonucleotide"
tgcacacctaccaaatcctctgttagctctttcagccagtgggaaaatga

SEQ ID NO: 136 - DNA, 50 bp, Artificial Sequence; identical to SEQ ID NO: 135
  source: /note="Description of Artificial Sequence: Synthetic oligonucleotide"

SEQ ID NO: 137 - DNA, 50 bp, Artificial Sequence
  source: /note="Description of Artificial Sequence: Synthetic oligonucleotide"
gttttctggaagaggcattttcccactggctgaaagagctaacagaggat

SEQ ID NO: 138 - DNA, 50 bp, Artificial Sequence; identical to SEQ ID NO: 137
  source: /note="Description of Artificial Sequence: Synthetic oligonucleotide"

SEQ ID NO: 139 - DNA, 50 bp, Artificial Sequence; identical to SEQ ID NO: 137
  source: /note="Description of Artificial Sequence: Synthetic oligonucleotide"

SEQ ID NO: 140 - DNA, 50 bp, Artificial Sequence
  source: /note="Description of Artificial Sequence: Synthetic oligonucleotide"
cctagtttcgtttctcttcctgttaggaattgttttcagcaatggaaaga

SEQ ID NO: 141 - DNA, 50 bp, Artificial Sequence
  source: /note="Description of Artificial Sequence: Synthetic oligonucleotide"
tcccaaaattccgcagcgtcatgagggagaaacgccggatctccttccat

SEQ ID NO: 142 - DNA, 50 bp, Artificial Sequence; identical to SEQ ID NO: 141
  source: /note="Description of Artificial Sequence: Synthetic oligonucleotide"

SEQ ID NO: 143 - DNA, 50 bp, Artificial Sequence
  source: /note="Description of Artificial Sequence: Synthetic oligonucleotide"
tcttcctgttaggaattgttttcagcaatggaaagaratggaaggagatc

SEQ ID NO: 144 - DNA, 50 bp, Artificial Sequence
  source: /note="Description of Artificial Sequence: Synthetic oligonucleotide"
cttcctgttaggaattgttttcagcaatggaaagaaatggaaggagatct

SEQ ID NO: 145 - DNA, 50 bp, Artificial Sequence
  source: /note="Description of Artificial Sequence: Synthetic oligonucleotide"
tcttcctgttaggaattgttttcagcaatggaaagaaatggaaggagatc

SEQ ID NO: 146 - DNA, 50 bp, Artificial Sequence
  source: /note="Description of Artificial Sequence: Synthetic oligonucleotide"
ttcctgttaggaattgttttcagcaatggaaagaaatggaaggagatcca

SEQ ID NO: 147 - DNA, 50 bp, Artificial Sequence
  source: /note="Description of Artificial Sequence: Synthetic oligonucleotide"
ttcctgttaggaattgttttcagcaatggaaagaaatggaaggagatcct

SEQ ID NO: 148 - DNA, 50 bp, Artificial Sequence; identical to SEQ ID NO: 147
  source: /note="Description of Artificial Sequence: Synthetic oligonucleotide"

SEQ ID NO: 149 - DNA, 50 bp, Artificial Sequence
  source: /note="Description of Artificial Sequence: Synthetic oligonucleotide"
cttcctgttaggaattgttttcagcaatggaaagaaatggaaggagatcc

SEQ ID NO: 150 - DNA, 50 bp, Artificial Sequence
  source: /note="Description of Artificial Sequence: Synthetic oligonucleotide"
cttcctgttaggaattgttttcagcaatggaaagaratggaaggagatcc

SEQ ID NO: 151 - DNA, 50 bp, Artificial Sequence; identical to SEQ ID NO: 150
  source: /note="Description of Artificial Sequence: Synthetic oligonucleotide"

SEQ ID NO: 152 - DNA, 50 bp, Artificial Sequence
  source: /note="Description of Artificial Sequence: Synthetic oligonucleotide"
cctgttaggaattgttttcagcaatggaaagaaatggaaggagatccggc

SEQ ID NO: 153 - DNA, 50 bp, Artificial Sequence; identical to SEQ ID NO: 152
  source: /note="Description of Artificial Sequence: Synthetic oligonucleotide"

SEQ ID NO: 154 - DNA, 50 bp, Artificial Sequence
  source: /note="Description of Artificial Sequence: Synthetic oligonucleotide"
ttcagcaatggaaagaaatggaaggagatccggcgtttctccctcatgac

SEQ ID NO: 155 - DNA, 50 bp, Artificial Sequence
  source: /note="Description of Artificial Sequence: Synthetic oligonucleotide"
ttgaacacggtcctcaatgctcctcttccccatcccaaaattccgcagca

SEQ ID NO: 156 - DNA, 50 bp, Artificial Sequence
  source: /note="Description of Artificial Sequence: Synthetic oligonucleotide"
tttcagcaatggaaagaaatggaaggagatccggcgtttctccctcatga

SEQ ID NO: 157 - DNA, 50 bp, Artificial Sequence; identical to SEQ ID NO: 75
  source: /note="Description of Artificial Sequence: Synthetic oligonucleotide"

SEQ ID NO: 158 - DNA, 50 bp, Artificial Sequence; identical to SEQ ID NO: 75
  source: /note="Description of Artificial Sequence: Synthetic oligonucleotide"

SEQ ID NO: 159 - DNA, 50 bp, Artificial Sequence
  source: /note="Description of Artificial Sequence: Synthetic oligonucleotide"
agtaaggtcagtgatatggagtagggtccagcgggcttcctcttgaacac

SEQ ID NO: 160 - DNA, 50 bp, Artificial Sequence
  source: /note="Description of Artificial Sequence: Synthetic oligonucleotide"
ccctcatgacgctgcggaattttgggatggggaagaggagcattgaggac

SEQ ID NO: 161 - DNA, 50 bp, Artificial Sequence
  source: /note="Description of Artificial Sequence: Synthetic oligonucleotide"
gtagggtcacccacccttggtttttctcaactcctccacaaggcaghggg

SEQ ID NO: 162 - DNA, 50 bp, Artificial Sequence; identical to SEQ ID NO: 161
  source: /note="Description of Artificial Sequence: Synthetic oligonucleotide"

SEQ ID NO: 163 - DNA, 50 bp, Artificial Sequence
  source: /note="Description of Artificial Sequence: Synthetic oligonucleotide"
gtagggtcacccacccttggtttttctcaactcctccacaaggcagcggg

SEQ ID NO: 164 - DNA, 50 bp, Artificial Sequence
  source: /note="Description of Artificial Sequence: Synthetic oligonucleotide"
tttgggatggggaagaggagcattgaggaccgtgttcaagaggaagccca

SEQ ID NO: 165 - DNA, 50 bp, Artificial Sequence; identical to SEQ ID NO: 164
  source: /note="Description of Artificial Sequence: Synthetic oligonucleotide"

SEQ ID NO: 166 - DNA, 50 bp, Artificial Sequence
  source: /note="Description of Artificial Sequence: Synthetic oligonucleotide"
tatatctaaagtttaatagtattttaaattgtttctaattatttagccta

SEQ ID NO: 167 - DNA, 50 bp, Artificial Sequence; identical to SEQ ID NO: 166
  source: /note="Description of Artificial Sequence: Synthetic oligonucleotide"

SEQ ID NO: 168 - DNA, 50 bp, Artificial Sequence; identical to SEQ ID NO: 166
  source: /note="Description of Artificial Sequence: Synthetic oligonucleotide"

SEQ ID NO: 169 - DNA, 50 bp, Artificial Sequence
  source: /note="Description of Artificial Sequence: Synthetic oligonucleotide"
tatctaaagtttaatagtattttaaattgtttctaattatttagcctcac

SEQ ID NO: 170 - DNA, 50 bp, Artificial Sequence; identical to SEQ ID NO: 169
  source: /note="Description of Artificial Sequence: Synthetic oligonucleotide"

SEQ ID NO: 171 - DNA, 50 bp, Artificial Sequence; identical to SEQ ID NO: 169
  source: /note="Description of Artificial Sequence: Synthetic oligonucleotide"

SEQ ID NO: 172 - DNA, 50 bp, Artificial Sequence
  source: /note="Description of Artificial Sequence: Synthetic oligonucleotide"
ttgattataaagatcagcaatttcttaacttaatggaaaagttgaatgaa

SEQ ID NO: 173 - DNA, 50 bp, Artificial Sequence
  source: /note="Description of Artificial Sequence: Synthetic oligonucleotide"
tgattataaagatcagcaatttcttaacttaatggaaaagttgaatgaaa

SEQ ID NO: 174 - DNA, 50 bp, Artificial Sequence; identical to SEQ ID NO: 173
  source: /note="Description of Artificial Sequence: Synthetic oligonucleotide"

SEQ ID NO: 175 - DNA, 50 bp, Artificial Sequence
  source: /note="Description of Artificial Sequence: Synthetic oligonucleotide"
tctcaggaagcaaaaatcttggccttacctggatccaggggctgctcaaa

SEQ ID NO: 176 - DNA, 50 bp, Artificial Sequence; identical to SEQ ID NO: 175
  source: /note="Description of Artificial Sequence: Synthetic oligonucleotide"

SEQ ID NO: 177 - DNA, 50 bp, Artificial Sequence; identical to SEQ ID NO: 175
  source: /note="Description of Artificial Sequence: Synthetic oligonucleotide"

SEQ ID NO: 178 - DNA, 50 bp, Artificial Sequence
  source: /note="Description of Artificial Sequence: Synthetic oligonucleotide"
atggaaaagttgaatgaaaacatcaagattttgagcagcccctggatcca

SEQ ID NO: 179 - DNA, 50 bp, Artificial Sequence
  source: /note="Description of Artificial Sequence: Synthetic oligonucleotide"
atggaaaagttgaatgaaaacatcaagaytttgagcagcccctggatcca

SEQ ID NO: 180 - DNA, 50 bp, Artificial Sequence; identical to SEQ ID NO: 178
  source: /note="Description of Artificial Sequence: Synthetic oligonucleotide"

SEQ ID NO: 181 - DNA, 50 bp, Artificial Sequence
  source: /note="Description of Artificial Sequence: Synthetic oligonucleotide"
agcaacgtttttaagtaatttgttgtgagttcccgggaagtaatcaatga

SEQ ID NO: 182 - DNA, 50 bp, Artificial Sequence
  source: /note="Description of Artificial Sequence: Synthetic oligonucleotide"
aatttaataaattattgttttctcttagatctgcaataatttttctccta

SEQ ID NO: 183 - DNA, 50 bp, Artificial Sequence; identical to SEQ ID NO: 182
  source: /note="Description of Artificial Sequence: Synthetic oligonucleotide"

SEQ ID NO: 184 - DNA, 50 bp, Artificial Sequence
  source: /note="Description of Artificial Sequence: Synthetic oligonucleotide"
tgttttctcttagatctgcaataatttttctcctatcattgattacttct

SEQ ID NO: 185 - DNA, 50 bp, Artificial Sequence; identical to SEQ ID NO: 184
  source: /note="Description of Artificial Sequence: Synthetic oligonucleotide"

SEQ ID NO: 186 - DNA, 50 bp, Artificial Sequence
  source: /note="Description of Artificial Sequence: Synthetic oligonucleotide"
ttgttttctcttagatctgcaataatttttctcctatcattgattacttc

SEQ ID NO: 187 - DNA, 50 bp, Artificial Sequence
  source: /note="Description of Artificial Sequence: Synthetic oligonucleotide"
ggacatgaacaaccctcaggactttattgattgcttcctgatgaaaatgg

SEQ ID NO: 188 - DNA, 50 bp, Artificial Sequence; identical to SEQ ID NO: 187
  source: /note="Description of Artificial Sequence: Synthetic oligonucleotide"

SEQ ID NO: 189 - DNA, 50 bp, Artificial Sequence
  source: /note="Description of Artificial Sequence: Synthetic oligonucleotide"
cacaaattcacaagcagtcacataactaagcttttgtttacattttacct

SEQ ID NO: 190 - DNA, 50 bp, Artificial Sequence
  source: /note="Description of Artificial Sequence: Synthetic oligonucleotide"
catgaacaaccctcaggactttattgattgcttcctgatgaaaatggaga

SEQ ID NO: 191 - DNA, 50 bp, Artificial Sequence; identical to SEQ ID NO: 190
  source: /note="Description of Artificial Sequence: Synthetic oligonucleotide"

SEQ ID NO: 192 - DNA, 50 bp, Artificial Sequence
  source: /note="Description of Artificial Sequence: Synthetic oligonucleotide"
aaacaagtcaactgcagtgttttccaagctttcaayagtaaattcagatg

SEQ ID NO: 193 - DNA, 50 bp, Artificial Sequence
  source: /note="Description of Artificial Sequence: Synthetic oligonucleotide"
ctctgtcccagctccaaacaagtcaactgcagtgttttccaagctttcaa

SEQ ID NO: 194 - DNA, 50 bp, Artificial Sequence
  source: /note="Description of Artificial Sequence: Synthetic oligonucleotide"
ttgcatcaaatcattcctaggaaaagcacaaccaaccatctgaatttact

SEQ ID NO: 195 - DNA, 50 bp, Artificial Sequence
  source: /note="Description of Artificial Sequence: Synthetic oligonucleotide"
ttgcatcaaatcattcctaggaaaagcacaaccaamcatctgaatttact

SEQ ID NO: 196 - DNA, 50 bp, Artificial Sequence
  source: /note="Description of Artificial Sequence: Synthetic oligonucleotide"
ttactattgaaagcttggaaaacactgcagttgacttgtttggagctggg

SEQ ID NO: 197 - DNA, 50 bp, Artificial Sequence; identical to SEQ ID NO: 196
  source: /note="Description of Artificial Sequence: Synthetic oligonucleotide"

SEQ ID NO: 198 - DNA, 50 bp, Artificial Sequence; identical to SEQ ID NO: 196
  source: /note="Description of Artificial Sequence: Synthetic oligonucleotide"

SEQ ID NO: 199 - DNA, 50 bp, Artificial Sequence
  source: /note="Description of Artificial Sequence: Synthetic oligonucleotide"
cttcagcaggagaaggagagcatatytcagggttgtgcttgtcgtctctg

SEQ ID NO: 200 - DNA, 50 bp, Artificial Sequence
  source: /note="Description of Artificial Sequence: Synthetic oligonucleotide"
cttcagcaggagaaggagagcatatctcagggttgtgcttgtcgtctctg

SEQ ID NO: 201 - DNA, 50 bp, Artificial Sequence; identical to SEQ ID NO: 200
  source: /note="Description of Artificial Sequence: Synthetic oligonucleotide"

SEQ ID NO: 202 - DNA, 50 bp, Artificial Sequence
  source: /note="Description of Artificial Sequence: Synthetic oligonucleotide"
ttctgaaaattaattaacttatcatctctgatcatacctgtgacctctga

SEQ ID NO: 203 - DNA, 50 bp, Artificial Sequence; identical to SEQ ID NO: 202
  source: /note="Description of Artificial Sequence: Synthetic oligonucleotide"

SEQ ID NO: 204 - DNA, 50 bp, Artificial Sequence
  source: /note="Description of Artificial Sequence: Synthetic oligonucleotide"
tttctgaaaattaattaacttatcatctctgatcatacctgtgacctctg

SEQ ID NO: 205 - DNA, 50 bp, Artificial Sequence
  source: /note="Description of Artificial Sequence: Synthetic oligonucleotide"
ggctcctgtcttgcatgcaggggctccggtttctgccaatcacacgttca

SEQ ID NO: 206 - DNA, 50 bp, Artificial Sequence
  source: /note="Description of Artificial Sequence: Synthetic oligonucleotide"
gctcctgtcttgcatgcaggggctccggtttctgccaatcacacgttcaa

SEQ ID NO: 207 - DNA, 50 bp, Artificial Sequence; identical to SEQ ID NO: 206
  source: /note="Description of Artificial Sequence: Synthetic oligonucleotide"

SEQ ID NO: 208 - DNA, 50 bp, Artificial Sequence
  source: /note="Description of Artificial Sequence: Synthetic oligonucleotide"
tcttatcagctaaagtccaggaagagattgaacgtgtgattggcagaaac

SEQ ID NO: 209 - DNA, 50 bp, Artificial Sequence; identical to SEQ ID NO: 208
  source: /note="Description of Artificial Sequence: Synthetic oligonucleotide"

SEQ ID NO: 210 - DNA, 50 bp, Artificial Sequence
  source: /note="Description of Artificial Sequence: Synthetic oligonucleotide"
cttatcagctaaagtccaggaagagattgaacgtgtgattggcagaaacc

SEQ ID NO: 211 - DNA, 50 bp, Artificial Sequence; identical to SEQ ID NO: 210
  source: /note="Description of Artificial Sequence: Synthetic oligonucleotide"

SEQ ID NO: 212 - DNA, 50 bp, Artificial Sequence
  source: /note="Description of Artificial Sequence: Synthetic oligonucleotide"
gtgcaccacagcatctgtgtagggcatgtgkctcctgtcttgcatgcagg

SEQ ID NO: 213 - DNA, 50 bp, Artificial Sequence; identical to SEQ ID NO: 212
  source: /note="Description of Artificial Sequence: Synthetic oligonucleotide"

SEQ ID NO: 214 - DNA, 50 bp, Artificial Sequence
  source: /note="Description of Artificial Sequence: Synthetic oligonucleotide"
gtgcaccacagcatctgtgtagggcatgtggctcctgtcttgcatgcagg

SEQ ID NO: 215 - DNA, 50 bp, Artificial Sequence
  source: /note="Description of Artificial Sequence: Synthetic oligonucleotide"
attgaacgtgtgattggcagaaaccrgagcmcctgcatgcaagacaggag

SEQ ID NO: 216 - DNA, 50 bp, Artificial Sequence; identical to SEQ ID NO: 215
  source: /note="Description of Artificial Sequence: Synthetic oligonucleotide"

SEQ ID NO: 217 - DNA, 50 bp, Artificial Sequence
  source: /note="Description of Artificial Sequence: Synthetic oligonucleotide"
ttgaacgtgtgattggcagaaaccggagcccctgcatgcaagacaggaga

SEQ ID NO: 218 - DNA, 50 bp, Artificial Sequence
  source: /note="Description of Artificial Sequence: Synthetic oligonucleotide"
cactgcatggggcaggctggtggggagaaggtcaatgtatctctggacct

SEQ ID NO: 219 - DNA, 50 bp, Artificial Sequence
  source: /note="Description of Artificial Sequence: Synthetic oligonucleotide"
actgcatggggcaggctggtggggagaaggtcaatgtatctctggacctt

SEQ ID NO: 220 - DNA, 50 bp, Artificial Sequence; identical to SEQ ID NO: 218
  source: /note="Description of Artificial Sequence: Synthetic oligonucleotide"

SEQ ID NO: 221 - DNA, 50 bp, Artificial Sequence
  source: /note="Description of Artificial Sequence: Synthetic oligonucleotide"
ttaatgtcacaggtcactgcatggggcaggctggtggggagaaggtcaat

SEQ ID NO: 222 - DNA, 50 bp, Artificial Sequence; identical to SEQ ID NO: 221
  source: /note="Description of Artificial Sequence: Synthetic oligonucleotide"

SEQ ID NO: 223 - DNA, 50 bp, Artificial Sequence; identical to SEQ ID NO: 221
  source: /note="Description of Artificial Sequence: Synthetic oligonucleotide"

SEQ ID NO: 224 - DNA, 50 bp, Artificial Sequence
  source: /note="Description of Artificial Sequence: Synthetic oligonucleotide"
agccacatgccctacacagatgctgtggtgcacgaggtccagagatacat

SEQ ID NO: 225 - DNA, 50 bp, Artificial Sequence
  source: /note="Description of Artificial Sequence: Synthetic oligonucleotide"
atttaatgtcacaggtcactgcatggggcaggctggtggggagaakstca

SEQ ID NO: 226 - DNA, 50 bp, Artificial Sequence
  source: /note="Description of Artificial Sequence: Synthetic oligonucleotide"
atttaatgtcacaggtcactgcatggggcaggctggtggggagaaggtca

SEQ ID NO: 227 - DNA, 50 bp, Artificial Sequence
  source: /note="Description of Artificial Sequence: Synthetic oligonucleotide"
acatgccctattcagatgctgtagtgcacgaggtccagagatacattgac

SEQ ID NO: 228 - DNA, 50 bp, Artificial Sequence
  source: /note="Description of Artificial Sequence: Synthetic oligonucleotide"
tgaatttaatgtcacaggtcacggcatagagcaggctggtggggagaagg

SEQ ID NO: 229 - DNA, 50 bp, Artificial Sequence
  source: /note="Description of Artificial Sequence: Synthetic oligonucleotide"
tgaatttaatgtcacaggtcactgcatggggcaggctggtggggagaakg

SEQ ID NO: 230 - DNA, 50 bp, Artificial Sequence
  source: /note="Description of Artificial Sequence: Synthetic oligonucleotide"
ctgaatttaatgtcacaggtcactgcatggggcaggctggtggggagaat

SEQ ID NO: 231 - DNA, 50 bp, Artificial Sequence
  source: /note="Description of Artificial Sequence: Synthetic oligonucleotide"
tctgaatttaatgtcacaggtcactgcatggggcaggctggtggggagaa

SEQ ID NO: 232 - DNA, 50 bp, Artificial Sequence; identical to SEQ ID NO: 231
  source: /note="Description of Artificial Sequence: Synthetic oligonucleotide"

SEQ ID NO: 233 - DNA, 50 bp, Artificial Sequence
  source: /note="Description of Artificial Sequence: Synthetic oligonucleotide"
cctgccccatgcagtgacctgtgacattaaattcagaaactatctcattt

SEQ ID NO: 234 - DNA, 50 bp, Artificial Sequence; identical to SEQ ID NO: 233
  source: /note="Description of Artificial Sequence: Synthetic oligonucleotide"

SEQ ID NO: 235 - DNA, 50 bp, Artificial Sequence
  source: /note="Description of Artificial Sequence: Synthetic oligonucleotide"
gcctgccccatgcagtgacctgtgacattaaattcagaaactatctcatt

SEQ ID NO: 236 - DNA, 50 bp, Artificial Sequence
  source: /note="Description of Artificial Sequence: Synthetic oligonucleotide"
gttgggaaattctttgttgtcatgtagcacagaagtcagggaaattaata

SEQ ID NO: 237 - DNA, 50 bp, Artificial Sequence; identical to SEQ ID NO: 236
  source: /note="Description of Artificial Sequence: Synthetic oligonucleotide"

SEQ ID NO: 238 - DNA, 50 bp, Artificial Sequence; identical to SEQ ID NO: 236
  source: /note="Description of Artificial Sequence: Synthetic oligonucleotide"

SEQ ID NO: 239 - DNA, 50 bp, Artificial Sequence
  source: /note="Description of Artificial Sequence: Synthetic oligonucleotide"
ttgtttctagggcacaaccatattaatttccctgacttctgtgctacatg

SEQ ID NO: 240 - DNA, 50 bp, Artificial Sequence
  source: /note="Description of Artificial Sequence: Synthetic oligonucleotide"
tgtttctagggcacaaccatattaatttccctgacttctgtgctacatga

SEQ ID NO: 241 - DNA, 50 bp, Artificial Sequence; identical to SEQ ID NO: 240
  source: /note="Description of Artificial Sequence: Synthetic oligonucleotide"

SEQ ID NO: 242 - DNA, 50 bp, Artificial Sequence
  source: /note="Description of Artificial Sequence: Synthetic oligonucleotide"
acgcatgaggagtaactgctctctgtgtttgctattttcaggaaaacggt

SEQ ID NO: 243 - DNA, 50 bp, Artificial Sequence; identical to SEQ ID NO: 242
  source: /note="Description of Artificial Sequence: Synthetic oligonucleotide"

SEQ ID NO: 244 - DNA, 50 bp, Artificial Sequence; identical to SEQ ID NO: 242
  source: /note="Description of Artificial Sequence: Synthetic oligonucleotide"

SEQ ID NO: 245 - DNA, 50 bp, Artificial Sequence
  source: /note="Description of Artificial Sequence: Synthetic oligonucleotide"
aagccctggccggcatggagctgtttttattcctgacctccattttacac

SEQ ID NO: 246 - DNA, 50 bp, Artificial Sequence; identical to SEQ ID NO: 245
  source: /note="Description of Artificial Sequence: Synthetic oligonucleotide"

SEQ ID NO: 247 - DNA, 50 bp, Artificial Sequence; identical to SEQ ID NO: 245
  source: /note="Description of Artificial Sequence: Synthetic oligonucleotide"

SEQ ID NO: 248 - DNA, 50 bp, Artificial Sequence
  source: /note="Description of Artificial Sequence: Synthetic oligonucleotide"
tgacaactggagtggtgtcaaggttctttgggtcaaccagagatttcagg

SEQ ID NO: 249 - DNA, 50 bp, Artificial Sequence
  source: /note="Description of Artificial Sequence: Synthetic oligonucleotide"
gacaactggagtggtgtcaaggttctttgggtcaaccagagatttcaggt

SEQ ID NO: 250 - DNA, 50 bp, Artificial Sequence; identical to SEQ ID NO: 248
  source: /note="Description of Artificial Sequence: Synthetic oligonucleotide"

SEQ ID NO: 251 - DNA, 50 bp, Artificial Sequence
  source: /note="Description of Artificial Sequence: Synthetic oligonucleotide"
tccattttacagaactttaacctgaaatctctggttgacccaaagaacct

SEQ ID NO: 252 - DNA, 50 bp, Artificial Sequence; identical to SEQ ID NO: 251
  source: /note="Description of Artificial Sequence: Synthetic oligonucleotide"

SEQ ID NO: 253 - DNA, 50 bp, Artificial Sequence
  source: /note="Description of Artificial Sequence: Synthetic oligonucleotide"
ctccattttacagaactttaacctgaaatctctggttgacccaaagaacc

SEQ ID NO: 254 - DNA, 50 bp, Artificial Sequence
  source: /note="Description of Artificial Sequence: Synthetic oligonucleotide"
tcttcttcagacaggaatgaagcacagctggtagaagggcggcacagagg

SEQ ID NO: 255 - DNA, 50 bp, Artificial Sequence; identical to SEQ ID NO: 254
  source: /note="Description of Artificial Sequence: Synthetic oligonucleotide"

SEQ ID NO: 256 - DNA, 50 bp, Artificial Sequence
  source: /note="Description of Artificial Sequence: Synthetic oligonucleotide"
ctctggttgacccaaagaaccttgacaccactccagttgtcaatggattt

SEQ ID NO: 257 - DNA, 50 bp, Artificial Sequence
  source: /note="Description of Artificial Sequence: Synthetic oligonucleotide"
ctgcagggactgcacagcagcagccaggccatctgctcttcttcagacag

SEQ ID NO: 258 - DNA, 50 bp, Artificial Sequence; identical to SEQ ID NO: 257
  source: /note="Description of Artificial Sequence: Synthetic oligonucleotide"

SEQ ID NO: 259 - DNA, 50 bp, Artificial Sequence
  source: /note="Description of Artificial Sequence: Synthetic oligonucleotide"
gagctgcagggactgcacagcagcagccaggccatctgctcttcttcaga

SEQ ID NO: 260 - DNA, 50 bp, Artificial Sequence
  source: /note="Description of Artificial Sequence: Synthetic oligonucleotide"
agctgcagggactgcacagcagcagccaggccatctgctcttcttcagaa

SEQ ID NO: 261 - DNA, 50 bp, Artificial Sequence; identical to SEQ ID NO: 259
  source: /note="Description of Artificial Sequence: Synthetic oligonucleotide"

SEQ ID NO: 262 - DNA, 50 bp, Artificial Sequence; identical to SEQ ID NO: 68
  source: /note="Description of Artificial Sequence: Synthetic oligonucleotide"

SEQ ID NO: 263 - DNA, 50 bp, Artificial Sequence; identical to SEQ ID NO: 98
  source: /note="Description of Artificial Sequence: Synthetic oligonucleotide"

SEQ ID NO: 264 - DNA, 50 bp, Artificial Sequence; identical to SEQ ID NO: 98
  source: /note="Description of Artificial Sequence: Synthetic oligonucleotide"

SEQ ID NO: 265 - DNA, 50 bp, Artificial Sequence; identical to SEQ ID NO: 102
  source: /note="Description of Artificial Sequence: Synthetic oligonucleotide"

SEQ ID NO: 266 - DNA, 50 bp, Artificial Sequence; identical to SEQ ID NO: 104
  source: /note="Description of Artificial Sequence: Synthetic oligonucleotide"

SEQ ID NO: 267 - DNA, 50 bp, Artificial Sequence; identical to SEQ ID NO: 104
  source: /note="Description of Artificial Sequence: Synthetic oligonucleotide"

SEQ ID NO: 268 - DNA, 50 bp, Artificial Sequence; identical to SEQ ID NO: 105
  source: /note="Description of Artificial Sequence: Synthetic oligonucleotide"

SEQ ID NO: 269 - DNA, 50 bp, Artificial Sequence; identical to SEQ ID NO: 105
  source: /note="Description of Artificial Sequence: Synthetic oligonucleotide"

SEQ ID NO: 270 - DNA, 50 bp, Artificial Sequence; identical to SEQ ID NO: 152
  source: /note="Description of Artificial Sequence: Synthetic oligonucleotide"

SEQ ID NO: 271 - DNA, 50 bp, Artificial Sequence
  source: /note="Description of Artificial Sequence: Synthetic oligonucleotide"
caatggaaagaaatggaaggagatccggcgtttctccctcatgacgctgc

SEQ ID NO: 272 - DNA, 50 bp, Artificial Sequence; identical to SEQ ID NO: 160
  source: /note="Description of Artificial Sequence: Synthetic oligonucleotide"

SEQ ID NO: 273 - DNA, 50 bp, Artificial Sequence; identical to SEQ ID NO: 164
  source: /note="Description of Artificial Sequence: Synthetic oligonucleotide"

SEQ ID NO: 274 - DNA, 50 bp, Artificial Sequence
  source: /note="Description of Artificial Sequence: Synthetic oligonucleotide"
caaattcacaagcagtcacataactaagcttttgtttacattttaccttc

SEQ ID NO: 275 - DNA, 50 bp, Artificial Sequence
  source: /note="Description of Artificial Sequence: Synthetic oligonucleotide"
aaacaagtcaactgcagtgttttccaagctttcaatagtaaattcagatg

SEQ ID NO: 276 - DNA, 50 bp, Artificial Sequence; identical to SEQ ID NO: 275
  source: /note="Description of Artificial Sequence: Synthetic oligonucleotide"

SEQ ID NO: 277 - DNA, 50 bp, Artificial Sequence; identical to SEQ ID NO: 208
  source: /note="Description of Artificial Sequence: Synthetic oligonucleotide"

SEQ ID NO: 278 - DNA, 50 bp, Artificial Sequence; identical to SEQ ID NO: 210
  source: /note="Description of Artificial Sequence: Synthetic oligonucleotide"

SEQ ID NO: 279 - DNA, 50 bp, Artificial Sequence; identical to SEQ ID NO: 257
  source: /note="Description of Artificial Sequence: Synthetic oligonucleotide"

SEQ ID NO: 280 - DNA, 50 bp, Artificial Sequence
  source: /note="Description of Artificial Sequence: Synthetic oligonucleotide"
atggtactatgggagtctcccctattccacgaagcatattacccatgaac

SEQ ID NO: 281 - DNA, 50 bp, Artificial Sequence
  source: /note="Description of Artificial Sequence: Synthetic oligonucleotide"
tatctacataggttgtttaaaggaatctgggtcatacatgtggatatatg

SEQ ID NO: 282 - DNA, 50 bp, Artificial Sequence; identical to SEQ ID NO: 281
  source: /note="Description of Artificial Sequence: Synthetic oligonucleotide"

SEQ ID NO: 283 - DNA, 50 bp, Artificial Sequence
  source: /note="Description of Artificial Sequence: Synthetic oligonucleotide"
acgcaacgcggatgcttgcagctggtcaccacgactccgactccgactcc

SEQ ID NO: 284 - DNA, 50 bp, Artificial Sequence; identical to SEQ ID NO: 283
  source: /note="Description of Artificial Sequence: Synthetic oligonucleotide"

SEQ ID NO: 285 - DNA, 50 bp, Artificial Sequence; identical to SEQ ID NO: 283
  source: /note="Description of Artificial Sequence: Synthetic oligonucleotide"

SEQ ID NO: 286 - DNA, 50 bp, Artificial Sequence
  source: /note="Description of Artificial Sequence: Synthetic oligonucleotide"
gggttccttgggaagaactacctcccctggaccagcttttctggggactg

SEQ ID NO: 287 - DNA, 50 bp, Artificial Sequence; identical to SEQ ID NO: 286
  source: /note="Description of Artificial Sequence: Synthetic oligonucleotide"

SEQ ID NO: 288 - DNA, 50 bp, Artificial Sequence; identical to SEQ ID NO: 286
  source: /note="Description of Artificial Sequence: Synthetic oligonucleotide"

SEQ ID NO: 289 - DNA, 50 bp, Artificial Sequence
  source: /note="Description of Artificial Sequence: Synthetic oligonucleotide"
atccctctgggaagtcaagcaagagaagacctgaaaaacaaccattggcc

SEQ ID NO: 290 - DNA, 50 bp, Artificial Sequence; identical to SEQ ID NO: 289
  source: /note="Description of Artificial Sequence: Synthetic oligonucleotide"

SEQ ID NO: 291 - DNA, 50 bp, Artificial Sequence; identical to SEQ ID NO: 289
  source: /note="Description of Artificial Sequence: Synthetic oligonucleotide"

SEQ ID NO: 292 - DNA, 50 bp, Artificial Sequence
  source: /note="Description of Artificial Sequence: Synthetic oligonucleotide"
caggcattatctgcctcatcagtgttttcggaacccatcacaacccagct

SEQ ID NO: 293 - DNA, 50 bp, Artificial Sequence; identical to SEQ ID NO: 292
  source: /note="Description of Artificial Sequence: Synthetic oligonucleotide"

SEQ ID NO: 294 - DNA, 50 bp, Artificial Sequence; identical to SEQ ID NO: 292
  source: /note="Description of Artificial Sequence: Synthetic oligonucleotide"

SEQ ID NO: 295 - DNA, 50 bp, Artificial Sequence
  source: /note="Description of Artificial Sequence: Synthetic oligonucleotide"
aggtggtcctgcagtgcagcgctaccgtgctcaaggagcagctcaagctc

SEQ ID NO: 296 - DNA, 50 bp, Artificial Sequence
  source: /note="Description of Artificial Sequence: Synthetic oligonucleotide"
agtgggctccaggaagcacaggcggttgccgaagccctcggcggccaggc

SEQ ID NO: 297 - DNA, 50 bp, Artificial Sequence; identical to SEQ ID NO: 296
  source: /note="Description of Artificial Sequence: Synthetic oligonucleotide"

SEQ ID NO: 298 - DNA, 50 bp, Artificial Sequence
  source: /note="Description of Artificial Sequence: Synthetic oligonucleotide"
tgctcaaggagcagctcaagctctgcctggccgccgagggcttcggcaac

SEQ ID NO: 299 - DNA, 50 bp, Artificial Sequence
  source: /note="Description of Artificial Sequence: Synthetic oligonucleotide"
ccctcctgcacagacctgcgcgttgctagtgggctccaggaagcacaggc

SEQ ID NO: 300 - DNA, 50 bp, Artificial Sequence; identical to SEQ ID NO: 299
  source: /note="Description of Artificial Sequence: Synthetic oligonucleotide"

SEQ ID NO: 301 - DNA, 50 bp, Artificial Sequence
  source: /note="Description of Artificial Sequence: Synthetic oligonucleotide"
ggtggaccatgcacccagcctccaagcagaggtctgaaggagaaaaggtc

SEQ ID NO: 302 - DNA, 50 bp, Artificial Sequence; identical to SEQ ID NO: 301
  source: /note="Description of Artificial Sequence: Synthetic oligonucleotide"

SEQ ID NO: 303 - DNA, 50 bp, Artificial Sequence
  source: /note="Description of Artificial Sequence: Synthetic oligonucleotide"
caggtagcgctcggaggagacactgacaaggatgatgtcatccccaacgt

SEQ ID NO: 304 - DNA, 50 bp, Artificial Sequence; identical to SEQ ID NO: 303
  source: /note="Description of Artificial Sequence: Synthetic oligonucleotide"

SEQ ID NO: 305 - DNA, 50 bp, Artificial Sequence; identical to SEQ ID NO: 303
  source: /note="Description of Artificial Sequence: Synthetic oligonucleotide"

SEQ ID NO: 306 - DNA, 50 bp, Artificial Sequence
  source: /note="Description of Artificial Sequence: Synthetic oligonucleotide"
aacccttgacttcactctcttctgtgtccccagacttgtctactatgaga

SEQ ID NO: 307 - DNA, 50 bp, Artificial Sequence
  source: /note="Description of Artificial Sequence: Synthetic oligonucleotide"
aacccttgacttcactctcttctgtgtccccagacttgtctactatgagc

SEQ ID NO: 308 - DNA, 50 bp, Artificial Sequence
  source: /note="Description of Artificial Sequence: Synthetic oligonucleotide"
gaacccttgacttcactctcttctgtgtccccagacttgtctactatgag

SEQ ID NO: 309 - DNA, 50 bp, Artificial Sequence
  source: /note="Description of Artificial Sequence: Synthetic oligonucleotide"
agtgactccccgtacttgatctcaggggggcccatgccctccacatccca

SEQ ID NO: 310 - DNA, 50 bp, Artificial Sequence; identical to SEQ ID NO: 309
  source: /note="Description of Artificial Sequence: Synthetic oligonucleotide"

SEQ ID NO: 311 - DNA, 50 bp, Artificial Sequence; identical to SEQ ID NO: 309
  source: /note="Description of Artificial Sequence: Synthetic oligonucleotide"

SEQ ID NO: 312 - DNA, 50 bp, Artificial Sequence
  source: /note="Description of Artificial Sequence: Synthetic oligonucleotide"
gtgagccacagtcctgaggccacatgctgcacgaagcacagtgactcccg

SEQ ID NO: 313 - DNA, 50 bp, Artificial Sequence; identical to SEQ ID NO: 312
  source: /note="Description of Artificial Sequence: Synthetic oligonucleotide"

SEQ ID NO: 314 - DNA, 50 bp, Artificial Sequence; identical to SEQ ID NO: 312
  source: /note="Description of Artificial Sequence: Synthetic oligonucleotide"

SEQ ID NO: 315 - DNA, 50 bp, Artificial Sequence
  source: /note="Description of Artificial Sequence: Synthetic oligonucleotide"
gctcacttgatgaactggttgtataggccattggtgctgtggatcatgca

SEQ ID NO: 316 - DNA, 50 bp, Artificial Sequence; identical to SEQ ID NO: 315
  source: /note="Description of Artificial Sequence: Synthetic oligonucleotide"

SEQ ID NO: 317 - DNA, 50 bp, Artificial Sequence; identical to SEQ ID NO: 315
  source: /note="Description of Artificial Sequence: Synthetic oligonucleotide"

SEQ ID NO: 318 - DNA, 50 bp, Artificial Sequence
  source: /note="Description of Artificial Sequence: Synthetic oligonucleotide"
ggcaggttgctcacttgatgaactggttgtataggccattggtgctgtgg

SEQ ID NO: 319 - DNA, 50 bp, Artificial Sequence; identical to SEQ ID NO: 318
  source: /note="Description of Artificial Sequence: Synthetic oligonucleotide"

SEQ ID NO: 320 - DNA, 50 bp, Artificial Sequence
  source: /note="Description of Artificial Sequence: Synthetic oligonucleotide"
tgcaggggaggaggcagccgagtcctggaaagagattgtgaatcttctct

SEQ ID NO: 321 - DNA, 50 bp, Artificial Sequence
  source: /note="Description of Artificial Sequence: Synthetic oligonucleotide"
gcaggggaggaggcagccgagtcctggaaagagattgtgaatcttctcta

SEQ ID NO: 322 - DNA, 50 bp, Artificial Sequence
  source: /note="Description of Artificial Sequence: Synthetic oligonucleotide"
tggggtgttctcaggggagtcaggactgggacccctacctaggagttcat

SEQ ID NO: 323 - DNA, 50 bp, Artificial Sequence; identical to SEQ ID NO: 322
  source: /note="Description of Artificial Sequence: Synthetic oligonucleotide"

SEQ ID NO: 324 - DNA, 50 bp, Artificial Sequence
  source: /note="Description of Artificial Sequence: Synthetic oligonucleotide"
ccagtcctattggatctgacacctcttccccsctcagcttctctaatcca

SEQ ID NO: 325 - DNA, 50 bp, Artificial Sequence
  source: /note="Description of Artificial Sequence: Synthetic oligonucleotide"
ccagtcctattggatctgacacctcttcccccctcagcttctctaatcca

SEQ ID NO: 326 - DNA, 50 bp, Artificial Sequence; identical to SEQ ID NO: 325
  source: /note="Description of Artificial Sequence: Synthetic oligonucleotide"

SEQ ID NO: 327 - DNA, 50 bp, Artificial Sequence
  source: /note="Description of Artificial Sequence: Synthetic oligonucleotide"
ttgctgaccagccagtccaagtttgtggagaagagggcacagttgctaya

SEQ ID NO: 328 - DNA, 50 bp, Artificial Sequence; identical to SEQ ID NO: 327
  source: /note="Description of Artificial Sequence: Synthetic oligonucleotide"

SEQ ID NO: 329 - DNA, 50 bp, Artificial Sequence
  source: /note="Description of Artificial Sequence: Synthetic oligonucleotide"
tattggatctgacacctcttcccccctcagcttctctaatccgtggcaat

SEQ ID NO: 330 - DNA, 50 bp, Artificial Sequence
  source: /note="Description of Artificial Sequence: Synthetic oligonucleotide"
attggatctgacacctcttcccccctcagcttctctaatccgtggcaatc

SEQ ID NO: 331 - DNA, 50 bp, Artificial Sequence; identical to SEQ ID NO: 330
  source: /note="Description of Artificial Sequence: Synthetic oligonucleotide"

SEQ ID NO: 332 - DNA, 50 bp, Artificial Sequence
  source: /note="Description of Artificial Sequence: Synthetic oligonucleotide"
agcctctgtcccactcccccgggttctcctaccagacgaggcctccagcc

SEQ ID NO: 333 - DNA, 50 bp, Artificial Sequence; identical to SEQ ID NO: 332
  source: /note="Description of Artificial Sequence: Synthetic oligonucleotide"

SEQ ID NO: 334 - DNA, 50 bp, Artificial Sequence; identical to SEQ ID NO: 332
  source: /note="Description of Artificial Sequence: Synthetic oligonucleotide"

SEQ ID NO: 335 - DNA, 50 bp, Artificial Sequence
  source: /note="Description of Artificial Sequence: Synthetic oligonucleotide"
aagctcacggccaggcagcaagttctcagtaataagatcttggttggagc

SEQ ID NO: 336 - DNA, 50 bp, Artificial Sequence; identical to SEQ ID NO: 335
  source: /note="Description of Artificial Sequence: Synthetic oligonucleotide"

SEQ ID NO: 337 - DNA, 50 bp, Artificial Sequence; identical to SEQ ID NO: 335
  source: /note="Description of Artificial Sequence: Synthetic oligonucleotide"

SEQ ID NO: 338 - DNA, 50 bp, Artificial Sequence
  source: /note="Description of Artificial Sequence: Synthetic oligonucleotide"
gtcctggacgtgctatgctccctgtgtgtgtgtaatggtgtggctgtact

SEQ ID NO: 339 - DNA, 50 bp, Artificial Sequence
  source: /note="Description of Artificial Sequence: Synthetic oligonucleotide"
aagctcacggccaggcagcaagttctcagtaataagatcttggttggaga

SEQ ID NO: 340 - DNA, 50 bp, Artificial Sequence; identical to SEQ ID NO: 339
  source: /note="Description of Artificial Sequence: Synthetic oligonucleotide"

SEQ ID NO: 341 - DNA, 50 bp, Artificial Sequence
  source: /note="Description of Artificial Sequence: Synthetic oligonucleotide"
cgtcctccgtggaagacaccatgagcctgctcgagtgcctcggccagatc

SEQ ID NO: 342 - DNA, 50 bp, Artificial Sequence
  source: /note="Description of Artificial Sequence: Synthetic oligonucleotide"
tcctccgtggaagacaccatgagcctgctcgagtgcctcggccagatcca

SEQ ID NO: 343 - DNA, 50 bp, Artificial Sequence; identical to SEQ ID NO: 342
  source: /note="Description of Artificial Sequence: Synthetic oligonucleotide"

SEQ ID NO: 344 - DNA, 50 bp, Artificial Sequence; identical to SEQ ID NO: 342
  source: /note="Description of Artificial Sequence: Synthetic oligonucleotide"

SEQ ID NO: 345 - DNA, 50 bp, Artificial Sequence
  source: /note="Description of Artificial Sequence: Synthetic oligonucleotide"
acaccatgagcctgctcgagtgcctcggccagatccgctcgctgctcatc

SEQ ID NO: 346 - DNA, 50 bp, Artificial Sequence; identical to SEQ ID NO: 345
  source: /note="Description of Artificial Sequence: Synthetic oligonucleotide"

SEQ ID NO: 347 - DNA, 50 bp, Artificial Sequence; identical to SEQ ID NO: 345
  source: /note="Description of Artificial Sequence: Synthetic oligonucleotide"

SEQ ID NO: 348 - DNA, 50 bp, Artificial Sequence
  source: /note="Description of Artificial Sequence: Synthetic oligonucleotide"
gtcttctaccaacacccgaacctgatgagggcgctgggcatgcacgagac

SEQ ID NO: 349 - DNA, 50 bp, Artificial Sequence; identical to SEQ ID NO: 348
  source: /note="Description of Artificial Sequence: Synthetic oligonucleotide"

SEQ ID NO: 350 - DNA, 50 bp, Artificial Sequence
  source: /note="Description of Artificial Sequence: Synthetic oligonucleotide"
agtcttctaccaacacccgaacctgatgagggcgctgggcatgcacgaga

SEQ ID NO: 351 - DNA, 50 bp, Artificial Sequence
  source: /note="Description of Artificial Sequence: Synthetic oligonucleotide"
agacattggctggaacccctgtggtggagagcgctacctggacttcctgc

SEQ ID NO: 352 - DNA, 50 bp, Artificial Sequence; identical to SEQ ID NO: 351
  source: /note="Description of Artificial Sequence: Synthetic oligonucleotide"

SEQ ID NO: 353 - DNA, 50 bp, Artificial Sequence; identical to SEQ ID NO: 351
  source: /note="Description of Artificial Sequence: Synthetic oligonucleotide"

SEQ ID NO: 354 - DNA, 50 bp, Artificial Sequence
  source: /note="Description of Artificial Sequence: Synthetic oligonucleotide"
gagaccccctttccccatgcgggtggccaggcgagagcgtggaggagaac

SEQ ID NO: 355 - DNA, 50 bp, Artificial Sequence; identical to SEQ ID NO: 354
  source: /note="Description of Artificial Sequence: Synthetic oligonucleotide"

SEQ ID NO: 356 - DNA, 50 bp, Artificial Sequence; identical to SEQ ID NO: 354
  source: /note="Description of Artificial Sequence: Synthetic oligonucleotide"

SEQ ID NO: 357 - DNA, 50 bp, Artificial Sequence
  source: /note="Description of Artificial Sequence: Synthetic oligonucleotide"
catgcgggtggccaggcgagagcgtggaggagaacgccaatgtggtggtg

SEQ ID NO: 358 - DNA, 50 bp, Artificial Sequence
  source: /note="Description of Artificial Sequence: Synthetic oligonucleotide"
ctcaccccgcagggcgggtccgaagcactcaggcttccggatgagcagcc

SEQ ID NO: 359 - DNA, 50 bp, Artificial Sequence; identical to SEQ ID NO: 358
  source: /note="Description of Artificial Sequence: Synthetic oligonucleotide"

SEQ ID NO: 360 - DNA, 50 bp, Artificial Sequence
  source: /note="Description of Artificial Sequence: Synthetic oligonucleotide"
cgcagggtcctcggagatgcggatggcctcttcgatggcagccagcagcg

SEQ ID NO: 361 - DNA, 50 bp, Artificial Sequence; identical to SEQ ID NO: 360
  source: /note="Description of Artificial Sequence: Synthetic oligonucleotide"

SEQ ID NO: 362 - DNA, 50 bp, Artificial Sequence
  source: /note="Description of Artificial Sequence: Synthetic oligonucleotide"
cggaagcctgagtgcttcggacccgccctgcggggtgagggtggctcagc

SEQ ID NO: 363 - DNA, 50 bp, Artificial Sequence
  source: /note="Description of Artificial Sequence: Synthetic oligonucleotide"
gggtctcacatgcatctctggtgcacagcgtccgagcaggtcgatcaagg

SEQ ID NO: 364 - DNA, 50 bp, Artificial Sequence; identical to SEQ ID NO: 363
  source: /note="Description of Artificial Sequence: Synthetic oligonucleotide"

SEQ ID NO: 365 - DNA, 50 bp, Artificial Sequence; identical to SEQ ID NO: 363
  source: /note="Description of Artificial Sequence: Synthetic oligonucleotide"

SEQ ID NO: 366 - DNA, 50 bp, Artificial Sequence
  source: /note="Description of Artificial Sequence: Synthetic oligonucleotide"
ccatcctgccctggctcagggtctcacatgcatctctggtgcacagcgtc

SEQ ID NO: 367 - DNA, 50 bp, Artificial Sequence
  source: /note="Description of Artificial Sequence: Synthetic oligonucleotide"
acctgggacacgccatcatgtccttctatgccgccttgatcgacctgctc

SEQ ID NO: 368 - DNA, 50 bp, Artificial Sequence; identical to SEQ ID NO: 367
  source: /note="Description of Artificial Sequence: Synthetic oligonucleotide"

SEQ ID NO: 369 - DNA, 50 bp, Artificial Sequence
  source: /note="Description of Artificial Sequence: Synthetic oligonucleotide"
ggacacgccatcatgtccttctatgccgccttgatcgacctgctcggaca

SEQ ID NO: 370 - DNA, 50 bp, Artificial Sequence; identical to SEQ ID NO: 369
  source: /note="Description of Artificial Sequence: Synthetic oligonucleotide"

SEQ ID NO: 371 - DNA, 50 bp, Artificial Sequence; identical to SEQ ID NO: 369
  source: /note="Description of Artificial Sequence: Synthetic oligonucleotide"

SEQ ID NO: 372 - DNA, 50 bp, Artificial Sequence
  source: /note="Description of Artificial Sequence: Synthetic oligonucleotide"
tccctccctctactccccagctaatccaagccggcaagggtgaggccctg

SEQ ID NO: 373 - DNA, 50 bp, Artificial Sequence
  source: /note="Description of Artificial Sequence: Synthetic oligonucleotide"
gcccacaaggtcctccaagggcacaagggagcggaggatggcgcggatcc

SEQ ID NO: 374 - DNA, 50 bp, Artificial Sequence; identical to SEQ ID NO: 373
  source: /note="Description of Artificial Sequence: Synthetic oligonucleotide"

SEQ ID NO: 375 - DNA, 50 bp, Artificial Sequence
  source: /note="Description of Artificial Sequence: Synthetic oligonucleotide"
cctctactccccagctaatccaagccggcaagggtgaggccctgcggatc

SEQ ID NO: 376 - DNA, 50 bp, Artificial Sequence
  source: /note="Description of Artificial Sequence: Synthetic oligonucleotide"
gatgatgcccacaaggtcctccaagggcacaagggagcggaggatggcgc

SEQ ID NO: 377 - DNA, 50 bp, Artificial Sequence; identical to SEQ ID NO: 375
  source: /note="Description of Artificial Sequence: Synthetic oligonucleotide"

SEQ ID NO: 378 - DNA, 50 bp, Artificial Sequence
  source: /note="Description of Artificial Sequence: Synthetic oligonucleotide"
ctctactccccagctaatccaagccggcaagggtgaggccctgyggaycc

SEQ ID NO: 379 - DNA, 50 bp, Artificial Sequence; identical to SEQ ID NO: 378
  source: /note="Description of Artificial Sequence: Synthetic oligonucleotide"

SEQ ID NO: 380 - DNA, 50 bp, Artificial Sequence
  source: /note="Description of Artificial Sequence: Synthetic oligonucleotide"
ctctactccccagctaatccaagccggcaagggtgaggccctgcggatcc

SEQ ID NO: 381 - DNA, 50 bp, Artificial Sequence
  source: /note="Description of Artificial Sequence: Synthetic oligonucleotide"
cagtgggaggctgatgatgcccacaaggtcctccaagggcacaagggagc

SEQ ID NO: 382 - DNA, 50 bp, Artificial Sequence; identical to SEQ ID NO: 381
  source: /note="Description of Artificial Sequence: Synthetic oligonucleotide"

SEQ ID NO: 383 - DNA, 50 bp, Artificial Sequence
  source: /note="Description of Artificial Sequence: Synthetic oligonucleotide"
agctaatccaagccggcaagggtgaggccctgcggatccgcgccatcctc

SEQ ID NO: 384 - DNA, 50 bp, Artificial Sequence
  source: /note="Description of Artificial Sequence: Synthetic oligonucleotide"
agctaatccaagccggcaagggtgaggccctgcggaycyrcgccatcctc

SEQ ID NO: 385 - DNA, 50 bp, Artificial Sequence
  source: /note="Description of Artificial Sequence: Synthetic oligonucleotide"
gcagtgggaggctgatgatgcccacaaggtcctccaagggcacaagggag

SEQ ID NO: 386 - DNA, 50 bp, Artificial Sequence; identical to SEQ ID NO: 385
  source: /note="Description of Artificial Sequence: Synthetic oligonucleotide"

SEQ ID NO: 387 - DNA, 50 bp, Artificial Sequence
  source: /note="Description of Artificial Sequence: Synthetic oligonucleotide"
ctaatccaagccggcaagggtgaggccctgcggatccgcgccatcctcca

SEQ ID NO: 388 - DNA, 50 bp, Artificial Sequence
  source: /note="Description of Artificial Sequence: Synthetic oligonucleotide"
acgtccagcacgtgcagcaagaagtcctggttctcgatgccatacacacc

SEQ ID NO: 389 - DNA, 50 bp, Artificial Sequence; identical to SEQ ID NO: 388
  source: /note="Description of Artificial Sequence: Synthetic oligonucleotide"

SEQ ID NO: 390 - DNA, 50 bp, Artificial Sequence
  source: /note="Description of Artificial Sequence: Synthetic oligonucleotide"
acgtccagcacgtgcagcaagaagtcctggttctcgatgccatacacaca

SEQ ID NO: 391 - DNA, 50 bp, Artificial Sequence
  source: /note="Description of Artificial Sequence: Synthetic oligonucleotide"
agcatccttcgtgccggaccacaaggcrtccatggtgctcttcctggacc

SEQ ID NO: 392 - DNA, 50 bp, Artificial Sequence
  source: /note="Description of Artificial Sequence: Synthetic oligonucleotide"
agcatccttcgtgccggaccacaaggcgtccatggtgctcttcctggacc

SEQ ID NO: 393 - DNA, 50 bp, Artificial Sequence; identical to SEQ ID NO: 392
  source: /note="Description of Artificial Sequence: Synthetic oligonucleotide"

SEQ ID NO: 394 - DNA, 50 bp, Artificial Sequence
  source: /note="Description of Artificial Sequence: Synthetic oligonucleotide"
tcgtgaaggctggcctccgctccttcttcgagagtgcctcggaggacatc

SEQ ID NO: 395 - DNA, 50 bp, Artificial Sequence; identical to SEQ ID NO: 394
  source: /note="Description of Artificial Sequence: Synthetic oligonucleotide"

SEQ ID NO: 396 - DNA, 50 bp, Artificial Sequence
  source: /note="Description of Artificial Sequence: Synthetic oligonucleotide"
cgggaaccagcagagcctggcgcacagtcgcctatgggacgcagtggtgg

SEQ ID NO: 397 - DNA, 50 bp, Artificial Sequence; identical to SEQ ID NO: 396
  source: /note="Description of Artificial Sequence: Synthetic oligonucleotide"

SEQ ID NO: 398 - DNA, 50 bp, Artificial Sequence
  source: /note="Description of Artificial Sequence: Synthetic oligonucleotide"
ctcgaacctgagcgagcttcatcatcatgtgggcgaacacgtgcaggaat

SEQ ID NO: 399 - DNA, 50 bp, Artificial Sequence
  source: /note="Description of Artificial Sequence: Synthetic oligonucleotide"
gggcagcaaagaagaagttgttgtagtgtcccaagagggacatcaccata

SEQ ID NO: 400 - DNA, 50 bp, Artificial Sequence
  source: /note="Description of Artificial Sequence: Synthetic oligonucleotide"
cctgacccctggccctgtgtgcccacagtccttcctgtacctgggctggt

SEQ ID NO: 401 - DNA, 50 bp, Artificial Sequence
  source: /note="Description of Artificial Sequence: Synthetic oligonucleotide"
caggtcctccccacacctgtttcccattgtgggtgacagaggacaggatg

SEQ ID NO: 402 - DNA, 50 bp, Artificial Sequence; identical to SEQ ID NO: 401
  source: /note="Description of Artificial Sequence: Synthetic oligonucleotide"

SEQ ID NO: 403 - DNA, 50 bp, Artificial Sequence
  source: /note="Description of Artificial Sequence: Synthetic oligonucleotide"
acatcgccatgggggtcaagacgctgcgcaycatcctgtcctctgtcacc

SEQ ID NO: 404 - DNA, 50 bp, Artificial Sequence; identical to SEQ ID NO: 403
  source: /note="Description of Artificial Sequence: Synthetic oligonucleotide"

SEQ ID NO: 405 - DNA, 50 bp, Artificial Sequence
  source: /note="Description of Artificial Sequence: Synthetic oligonucleotide"
acatcgccatgggggtcaagacgctgcgcaccatcctgtcctctgtcacc

SEQ ID NO: 406 - DNA, 50 bp, Artificial Sequence
  source: /note="Description of Artificial Sequence: Synthetic oligonucleotide"
acggtgtacaggtagacgaccaccgccagaaggcccacggtcatcaccac

SEQ ID NO: 407 - DNA, 50 bp, Artificial Sequence; identical to SEQ ID NO: 406
  source: /note="Description of Artificial Sequence: Synthetic oligonucleotide"

SEQ ID NO: 408 - DNA, 50 bp, Artificial Sequence; identical to SEQ ID NO: 406
  source: /note="Description of Artificial Sequence: Synthetic oligonucleotide"

SEQ ID NO: 409 - DNA, 50 bp, Artificial Sequence
  source: /note="Description of Artificial Sequence: Synthetic oligonucleotide"
ccccatcctgcccccagctggtgatgaccgtgggccttctggcggtggtc

SEQ ID NO: 410 - DNA, 50 bp, Artificial Sequence; identical to SEQ ID NO: 409
  source: /note="Description of Artificial Sequence: Synthetic oligonucleotide"

SEQ ID NO: 411 - DNA, 50 bp, Artificial Sequence
  source: /note="Description of Artificial Sequence: Synthetic oligonucleotide"
tcagtgttacctgtttcacatgtacgtgggtgtccgggctggcggaggca

SEQ ID NO: 412 - DNA, 50 bp, Artificial Sequence; identical to SEQ ID NO: 411
  source: /note="Description of Artificial Sequence: Synthetic oligonucleotide"

SEQ ID NO: 413 - DNA, 50 bp, Artificial Sequence
  source: /note="Description of Artificial Sequence: Synthetic oligonucleotide"
ccctgtagagctcgtattcgtcacccgcggggtcctcgatctcgtcccca

SEQ ID NO: 414 - DNA, 50 bp, Artificial Sequence; identical to SEQ ID NO: 301
  source: /note="Description of Artificial Sequence: Synthetic oligonucleotide"

SEQ ID NO: 415 - DNA, 50 bp, Artificial Sequence; identical to SEQ ID NO: 318
  source: /note="Description of Artificial Sequence: Synthetic oligonucleotide"

SEQ ID NO: 416 - DNA, 50 bp, Artificial Sequence
  source: /note="Description of Artificial Sequence: Synthetic oligonucleotide"
gcttgctgaccagccagtccaagtttgtggagaagagggcacagttgcta

SEQ ID NO: 417 - DNA, 50 bp, Artificial Sequence; identical to SEQ ID NO: 341
  source: /note="Description of Artificial Sequence: Synthetic oligonucleotide"

SEQ ID NO: 418 - DNA, 50 bp, Artificial Sequence; identical to SEQ ID NO: 341
  source: /note="Description of Artificial Sequence: Synthetic oligonucleotide"

SEQ ID NO: 419 - DNA, 50 bp, Artificial Sequence; identical to SEQ ID NO: 351
  source: /note="Description of Artificial Sequence: Synthetic oligonucleotide"

SEQ ID NO: 420 - DNA, 50 bp, Artificial Sequence
  source: /note="Description of Artificial Sequence: Synthetic oligonucleotide"
gctcatgagaccccctttccccatgcgggtggccaggcgagagcgtggag

SEQ ID NO: 421 - DNA, 50 bp, Artificial Sequence; identical to SEQ ID NO: 420
  source: /note="Description of Artificial Sequence: Synthetic oligonucleotide"

SEQ ID NO: 422 - DNA, 50 bp, Artificial Sequence; identical to SEQ ID NO: 420
  source: /note="Description of Artificial Sequence: Synthetic oligonucleotide"

SEQ ID NO: 423 - DNA, 50 bp, Artificial Sequence
  source: /note="Description of Artificial Sequence: Synthetic oligonucleotide"
tgatgatgcccacaaggtcctccaagggcacaagggagcggaggatggcg

SEQ ID NO: 424 - DNA, 50 bp, Artificial Sequence; identical to SEQ ID NO: 394
  source: /note="Description of Artificial Sequence: Synthetic oligonucleotide"

SEQ ID NO: 425 - DNA, 50 bp, Artificial Sequence; identical to SEQ ID NO: 399
  source: /note="Description of Artificial Sequence: Synthetic oligonucleotide"

SEQ ID NO: 426 - DNA, 50 bp, Artificial Sequence; identical to SEQ ID NO: 399
  source: /note="Description of Artificial Sequence: Synthetic oligonucleotide"

SEQ ID NO: 427 - DNA, 50 bp, Artificial Sequence; identical to SEQ ID NO: 401
  source: /note="Description of Artificial Sequence: Synthetic oligonucleotide"

SEQ ID NO: 428 - DNA, 50 bp, Artificial Sequence; identical to SEQ ID NO: 409
  source: /note="Description of Artificial Sequence: Synthetic oligonucleotide"

SEQ ID NO: 429 - DNA, 50 bp, Artificial Sequence
  source: /note="Description of Artificial Sequence: Synthetic oligonucleotide"
cacacttcatgtcaggttcatcctcatcctcgctcttgttgtagaacttg

SEQ ID NO: 430 - DNA, 50 bp, Artificial Sequence; identical to SEQ ID NO: 429
  source: /note="Description of Artificial Sequence: Synthetic oligonucleotide"

SEQ ID NO: 431 - DNA, 50 bp, Artificial Sequence; identical to SEQ ID NO: 429
  source: /note="Description of Artificial Sequence: Synthetic oligonucleotide"

SEQ ID NO: 432 - DNA, 50 bp, Artificial Sequence
  source: /note="Description of Artificial Sequence: Synthetic oligonucleotide"
gggcgaggggctttgctgggggagcgcggagtgcaattcaaccctggttc

SEQ ID NO: 433 - DNA, 50 bp, Artificial Sequence; identical to SEQ ID NO: 432
  source: /note="Description of Artificial Sequence: Synthetic oligonucleotide"

SEQ ID NO: 434 - DNA, 50 bp, Artificial Sequence; identical to SEQ ID NO: 432
  source: /note="Description of Artificial Sequence: Synthetic oligonucleotide"

SEQ ID NO: 435 - DNA, 50 bp, Artificial Sequence
  source: /note="Description of Artificial Sequence: Synthetic oligonucleotide"
cagcctccaactgggccttttatcctgaccctgcctctgcaccctgttat

SEQ ID NO: 436 - DNA, 50 bp, Artificial Sequence; identical to SEQ ID NO: 435
  source: /note="Description of Artificial Sequence: Synthetic oligonucleotide"

SEQ ID NO: 437 - DNA, 50 bp, Artificial Sequence; identical to SEQ ID NO: 435
  source: /note="Description of Artificial Sequence: Synthetic oligonucleotide"

SEQ ID NO: 438 - DNA, 50 bp, Artificial Sequence
  source: /note="Description of Artificial Sequence: Synthetic oligonucleotide"
gggcagagggcggggccctggtgggaggcggycatgrgwgttagggtggc

SEQ ID NO: 439 - DNA, 50 bp, Artificial Sequence; identical to SEQ ID NO: 438
  source: /note="Description of Artificial Sequence: Synthetic oligonucleotide"

SEQ ID NO: 440 - DNA, 50 bp, Artificial Sequence
  source: /note="Description of Artificial Sequence: Synthetic oligonucleotide"
gggcagagggcggggccctggtgggaggcggtcatgggtgttagggtggc

SEQ ID NO: 441 - DNA, 50 bp, Artificial Sequence
  source: /note="Description of Artificial Sequence: Synthetic oligonucleotide"
tgcactcctcacaggactcttgctactcctggttcagcgccaccctaaca

SEQ ID NO: 442 - DNA, 50 bp, Artificial Sequence; identical to SEQ ID NO: 441
  source: /note="Description of Artificial Sequence: Synthetic oligonucleotide"

SEQ ID NO: 443 - DNA, 50 bp, Artificial Sequence; identical to SEQ ID NO: 441
  source: /note="Description of Artificial Sequence: Synthetic oligonucleotide"

SEQ ID NO: 444 - DNA, 50 bp, Artificial Sequence
  source: /note="Description of Artificial Sequence: Synthetic oligonucleotide"
gcagaaggtttcccaaaaggggcagagggcggggccctggtgggaggskg

SEQ ID NO: 445 - DNA, 50 bp, Artificial Sequence
  source: /note="Description of Artificial Sequence: Synthetic oligonucleotide"
cagaaggtttcccaaaaggggcagagggcggggccctggtgggaggskgt

SEQ ID NO: 446 - DNA, 50 bp, Artificial Sequence
  source: /note="Description of Artificial Sequence: Synthetic oligonucleotide"
acaggactcttgctactcctggttcagcgccaccctaacwcycatgrccg

SEQ ID NO: 447 - DNA, 50 bp, Artificial Sequence
  source: /note="Description of Artificial Sequence: Synthetic oligonucleotide"
tgcagaaggtttcccaaaaggggcagagggcggggccctggtgggaggst

SEQ ID NO: 448 - DNA, 50 bp, Artificial Sequence
  source: /note="Description of Artificial Sequence: Synthetic oligonucleotide"
tgcagaaggtttcccaaaaggggcagagggcggggccctggtgggaggbt

SEQ ID NO: 449 - DNA, 50 bp, Artificial Sequence; identical to SEQ ID NO: 448
  source: /note="Description of Artificial Sequence: Synthetic oligonucleotide"

SEQ ID NO: 450 - DNA, 50 bp, Artificial Sequence
  source: /note="Description of Artificial Sequence: Synthetic oligonucleotide"
acaggactcttgctactcctggttcagcgccaccctaacacccatgaccg

SEQ ID NO: 451 - DNA, 50 bp, Artificial Sequence
  source: /note="Description of Artificial Sequence: Synthetic oligonucleotide"
ctgcagaaggtttcccaaaaggggcagagggcggggccctggtgggaggc

SEQ ID NO: 452 - DNA, 50 bp, Artificial Sequence; identical to SEQ ID NO: 451
  source: /note="Description of Artificial Sequence: Synthetic oligonucleotide"

SEQ ID NO: 453 - DNA, 50 bp, Artificial Sequence
  source: /note="Description of Artificial Sequence: Synthetic oligonucleotide"
cgtctgtgtcttaccctcagaaaggatttgagtaggcctcttctatccat

SEQ ID NO: 454 - DNA, 50 bp, Artificial Sequence; identical to SEQ ID NO: 453
  source: /note="Description of Artificial Sequence: Synthetic oligonucleotide"

SEQ ID NO: 455 - DNA, 50 bp, Artificial Sequence; identical to SEQ ID NO: 453
  source: /note="Description of Artificial Sequence: Synthetic oligonucleotide"

SEQ ID NO: 456 - DNA, 50 bp, Artificial Sequence
  source: /note="Description of Artificial Sequence: Synthetic oligonucleotide"
ctaacagccacccctggtgtggatgtgattggcagttccgagagaaataa

SEQ ID NO: 457 - DNA, 50 bp, Artificial Sequence; identical to SEQ ID NO: 456
  source: /note="Description of Artificial Sequence: Synthetic oligonucleotide"

SEQ ID NO: 458 - DNA, 50 bp, Artificial Sequence; identical to SEQ ID NO: 456
  source: /note="Description of Artificial Sequence: Synthetic oligonucleotide"

SEQ ID NO: 459 - DNA, 50 bp, Artificial Sequence
  source: /note="Description of Artificial Sequence: Synthetic oligonucleotide"
tggtgtggatgtgattggcagttccgagagaaatawggggacgtcttcac

SEQ ID NO: 460 - DNA, 50 bp, Artificial Sequence
  source: /note="Description of Artificial Sequence: Synthetic oligonucleotide"
tggtgtggatgtgattggcagttccgagagaaatatggggacgtcttcac

SEQ ID NO: 461 - DNA, 50 bp, Artificial Sequence; identical to SEQ ID NO: 460
  source: /note="Description of Artificial Sequence: Synthetic oligonucleotide"

SEQ ID NO: 462 - DNA, 50 bp, Artificial Sequence
  source: /note="Description of Artificial Sequence: Synthetic oligonucleotide"
tcgaccatggcgatttttccccggccagagaaggcctcagccttgtccac

SEQ ID NO: 463 - DNA, 50 bp, Artificial Sequence; identical to SEQ ID NO: 462
  source: /note="Description of Artificial Sequence: Synthetic oligonucleotide"

SEQ ID NO: 464 - DNA, 50 bp, Artificial Sequence
  source: /note="Description of Artificial Sequence: Synthetic oligonucleotide"
tgaggctctcaccatatccccggaagaatgggtcgaccatggcgattttt

SEQ ID NO: 465 - DNA, 50 bp, Artificial Sequence; identical to SEQ ID NO: 464
  source: /note="Description of Artificial Sequence: Synthetic oligonucleotide"

SEQ ID NO: 466 - DNA, 50 bp, Artificial Sequence; identical to SEQ ID NO: 464
  source: /note="Description of Artificial Sequence: Synthetic oligonucleotide"

SEQ ID NO: 467 - DNA, 50 bp, Artificial Sequence
  source: /note="Description of Artificial Sequence: Synthetic oligonucleotide"
ggccttctctggccggggaaaaatcgccatggtcgacccattcttccggg

SEQ ID NO: 468 - DNA, 50 bp, Artificial Sequence
  source: /note="Description of Artificial Sequence: Synthetic oligonucleotide"
gccttctctggccggggaaaaatcgccatggtcgacccattcttccrggt

SEQ ID NO: 469 - DNA, 50 bp, Artificial Sequence; identical to SEQ ID NO: 468
  source: /note="Description of Artificial Sequence: Synthetic oligonucleotide"

SEQ ID NO: 470 - DNA, 50 bp, Artificial Sequence
  source: /note="Description of Artificial Sequence: Synthetic oligonucleotide"
tccaacttcttctacaaccaacccacacctsccctgcaccccaggtgtga

SEQ ID NO: 471 - DNA, 50 bp, Artificial Sequence; identical to SEQ ID NO: 470
  source: /note="Description of Artificial Sequence: Synthetic oligonucleotide"

SEQ ID NO: 472 - DNA, 50 bp, Artificial Sequence
  source: /note="Description of Artificial Sequence: Synthetic oligonucleotide"
ggtcacagagaatcgccgaagcaccttccagcggtttccattggcaaaga

SEQ ID NO: 473 - DNA, 50 bp, Artificial Sequence
  source: /note="Description of Artificial Sequence: Synthetic oligonucleotide"
aggtgcttcggcgattctctgtgaccactatgagggacttcgggatggga

SEQ ID NO: 474 - DNA, 50 bp, Artificial Sequence; identical to SEQ ID NO: 473
  source: /note="Description of Artificial Sequence: Synthetic oligonucleotide"

SEQ ID NO: 475 - DNA, 50 bp, Artificial Sequence; identical to SEQ ID NO: 473
  source: /note="Description of Artificial Sequence: Synthetic oligonucleotide"

SEQ ID NO: 476 - DNA, 50 bp, Artificial Sequence
  source: /note="Description of Artificial Sequence: Synthetic oligonucleotide"
aggactcacccttggatttccgaagctcctctatcagacactgagcctca

SEQ ID NO: 477 - DNA, 50 bp, Artificial Sequence; identical to SEQ ID NO: 476
  source: /note="Description of Artificial Sequence: Synthetic oligonucleotide"

SEQ ID NO: 478 - DNA, 50 bp, Artificial Sequence; identical to SEQ ID NO: 476
  source: /note="Description of Artificial Sequence: Synthetic oligonucleotide"

SEQ ID NO: 479 - DNA, 50 bp, Artificial Sequence
  source: /note="Description of Artificial Sequence: Synthetic oligonucleotide"
ctttctttcctattcatcccccaggactcacccttggatttccgaagytc

SEQ ID NO: 480 - DNA, 50 bp, Artificial Sequence
  source: /note="Description of Artificial Sequence: Synthetic oligonucleotide"
ctttctttcctattcatcccccaggactcacccttggatttccgaagctc

SEQ ID NO: 481 - DNA, 50 bp, Artificial Sequence; identical to SEQ ID NO: 480
  source: /note="Description of Artificial Sequence: Synthetic oligonucleotide"

SEQ ID NO: 482 - DNA, 50 bp, Artificial Sequence
  source: /note="Description of Artificial Sequence: Synthetic oligonucleotide"
tcagtctgtgtccttgacctgctgcttcttcctaggggccctcatggacc

SEQ ID NO: 483 - DNA, 50 bp, Artificial Sequence; identical to SEQ ID NO: 482
  source: /note="Description of Artificial Sequence: Synthetic oligonucleotide"

SEQ ID NO: 484 - DNA, 50 bp, Artificial Sequence; identical to SEQ ID NO: 482
  source: /note="Description of Artificial Sequence: Synthetic oligonucleotide"

SEQ ID NO: 485 - DNA, 50 bp, Artificial Sequence
  source: /note="Description of Artificial Sequence: Synthetic oligonucleotide"
gtctgtgtccttgacctgctgcttcttcctaggggccctcatggacccca

SEQ ID NO: 486 - DNA, 50 bp, Artificial Sequence; identical to SEQ ID NO: 485
  source: /note="Description of Artificial Sequence: Synthetic oligonucleotide"

SEQ ID NO: 487 - DNA, 50 bp, Artificial Sequence; identical to SEQ ID NO: 485
  source: /note="Description of Artificial Sequence: Synthetic oligonucleotide"

SEQ ID NO: 488 - DNA, 50 bp, Artificial Sequence
  source: /note="Description of Artificial Sequence: Synthetic oligonucleotide"
acctgctgcttcttcctatgggccctcatggaccccaccttcctcttcca

SEQ ID NO: 489 - DNA, 50 bp, Artificial Sequence
  source: /note="Description of Artificial Sequence: Synthetic oligonucleotide"
acctgcagcttcttcctatgggccctcatggaccacaccttcctcttcca

SEQ ID NO: 490 - DNA, 50 bp, Artificial Sequence
  source: /note="Description of Artificial Sequence: Synthetic oligonucleotide"
ggaatcgttttccaaagacgatggagcagatgatgttggcggtaatggaa

SEQ ID NO: 491 - DNA, 50 bp, Artificial Sequence
  source: /note="Description of Artificial Sequence: Synthetic oligonucleotide"
tcagcatcttcaggaactcttgatcttggtagtggaatcgttttccaaag

SEQ ID NO: 492 - DNA, 50 bp, Artificial Sequence
  source: /note="Description of Artificial Sequence: Synthetic oligonucleotide"
cagcatcttcaggaactcttgatcttggtagtggaatcgttttccaaaga

SEQ ID NO: 493 - DNA, 50 bp, Artificial Sequence
  source: /note="Description of Artificial Sequence: Synthetic oligonucleotide"
cagcatcttcaggaactcttgatcttggtagtggaakcgttttccraaga

SEQ ID NO: 494 - DNA, 50 bp, Artificial Sequence
  source: /note="Description of Artificial Sequence: Synthetic oligonucleotide"
ggccgaatacagagctgatgagtgaaaaagtctggtagaacaagttcagc

SEQ ID NO: 495 - DNA, 50 bp, Artificial Sequence; identical to SEQ ID NO: 494
  source: /note="Description of Artificial Sequence: Synthetic oligonucleotide"

SEQ ID NO: 496 - DNA, 50 bp, Artificial Sequence; identical to SEQ ID NO: 494
  source: /note="Description of Artificial Sequence: Synthetic oligonucleotide"

SEQ ID NO: 497 - DNA, 50 bp, Artificial Sequence
  source: /note="Description of Artificial Sequence: Synthetic oligonucleotide"
tcccagaccccactttttccatgtggagcaggtaggtgtcgatgaggtcc

SEQ ID NO: 498 - DNA, 50 bp, Artificial Sequence; identical to SEQ ID NO: 497
  source: /note="Description of Artificial Sequence: Synthetic oligonucleotide"

SEQ ID NO: 499 - DNA, 50 bp, Artificial Sequence; identical to SEQ ID NO: 497
  source: /note="Description of Artificial Sequence: Synthetic oligonucleotide"

SEQ ID NO: 500 - DNA, 50 bp, Artificial Sequence
  source: /note="Description of Artificial Sequence: Synthetic oligonucleotide"
ccctgaccctccccttccttccctactgtggacgcaggagaaatccaacc

SEQ ID NO: 501 - DNA, 50 bp, Artificial Sequence
  source: /note="Description of Artificial Sequence: Synthetic oligonucleotide"
ctcaacacgctctcgctcttctttgctggcactgagaccaccagcaccag

SEQ ID NO: 502 - DNA, 50 bp, Artificial Sequence; identical to SEQ ID NO: 501
  source: /note="Description of Artificial Sequence: Synthetic oligonucleotide"

SEQ ID NO: 503 - DNA, 50 bp, Artificial Sequence
  source: /note="Description of Artificial Sequence: Synthetic oligonucleotide"
acctgcaacatgagggtatttgagcatgagcaggaagccgtagcggagac

SEQ ID NO: 504 - DNA, 50 bp, Artificial Sequence
  source: /note="Description of Artificial Sequence: Synthetic oligonucleotide"
aatgagattcattggtcttcttttctgtacagagagagtctacagggaga

SEQ ID NO: 505 - DNA, 50 bp, Artificial Sequence
  source: /note="Description of Artificial Sequence: Synthetic oligonucleotide"
atgagattcattggtcttcttttctgtacagagagagtctacagggagat

SEQ ID NO: 506 - DNA, 50 bp, Artificial Sequence
  source: /note="Description of Artificial Sequence: Synthetic oligonucleotide"
tctgtacagagagagtctacagggagattgaacaggtgattggcccacat

SEQ ID NO: 507 - DNA, 50 bp, Artificial Sequence; identical to SEQ ID NO: 506
  source: /note="Description of Artificial Sequence: Synthetic oligonucleotide"

SEQ ID NO: 508 - DNA, 50 bp, Artificial Sequence; identical to SEQ ID NO: 506
  source: /note="Description of Artificial Sequence: Synthetic oligonucleotide"

SEQ ID NO: 509 - DNA, 50 bp, Artificial Sequence
  source: /note="Description of Artificial Sequence: Synthetic oligonucleotide"
ggagggctatggggttccagccggtcttaccttggggatgatgtaccctc

SEQ ID NO: 510 - DNA, 50 bp, Artificial Sequence; identical to SEQ ID NO: 509
  source: /note="Description of Artificial Sequence: Synthetic oligonucleotide"

SEQ ID NO: 511 - DNA, 50 bp, Artificial Sequence; identical to SEQ ID NO: 509
  source: /note="Description of Artificial Sequence: Synthetic oligonucleotide"

SEQ ID NO: 512 - DNA, 50 bp, Artificial Sequence
  source: /note="Description of Artificial Sequence: Synthetic oligonucleotide"
atatcttttgatcttgtgatcctccctcaggacacagaagtatttctcaa

SEQ ID NO: 513 - DNA, 50 bp, Artificial Sequence
  source: /note="Description of Artificial Sequence: Synthetic oligonucleotide"
atatcttttgatcttgtgatcctcyctcaggacacagaagtatttctcaa

SEQ ID NO: 514 - DNA, 50 bp, Artificial Sequence; identical to SEQ ID NO: 513
  source: /note="Description of Artificial Sequence: Synthetic oligonucleotide"

SEQ ID NO: 515 - DNA, 50 bp, Artificial Sequence
  source: /note="Description of Artificial Sequence: Synthetic oligonucleotide"
gccagccccgtggccccagaagacatcgatctgacaccccaggagtgtga

SEQ ID NO: 516 - DNA, 50 bp, Artificial Sequence; identical to SEQ ID NO: 515
  source: /note="Description of Artificial Sequence: Synthetic oligonucleotide"

SEQ ID NO: 517 - DNA, 50 bp, Artificial Sequence; identical to SEQ ID NO: 515
  source: /note="Description of Artificial Sequence: Synthetic oligonucleotide"

SEQ ID NO: 518 - DNA, 50 bp, Artificial Sequence
  source: /note="Description of Artificial Sequence: Synthetic oligonucleotide"
tgacaccccaggagtgtggtgtgggcaaaatacccccaacataccagatc

SEQ ID NO: 519 - DNA, 50 bp, Artificial Sequence
  source: /note="Description of Artificial Sequence: Synthetic oligonucleotide"
tggaatcctttgacccccttccctcagccccttcagcggggcaggaagca

SEQ ID NO: 520 - DNA, 50 bp, Artificial Sequence; identical to SEQ ID NO: 519
  source: /note="Description of Artificial Sequence: Synthetic oligonucleotide"

SEQ ID NO: 521 - DNA, 50 bp, Artificial Sequence; identical to SEQ ID NO: 504
  source: /note="Description of Artificial Sequence: Synthetic oligonucleotide"

SEQ ID NO: 522 - DNA, 50 bp, Artificial Sequence
  source: /note="Description of Artificial Sequence: Synthetic oligonucleotide"
tgtgttcttttctttctaaaaggctttctaaaaagccttctgtttaattt

SEQ ID NO: 523 - DNA, 50 bp, Artificial Sequence; identical to SEQ ID NO: 522
  source: /note="Description of Artificial Sequence: Synthetic oligonucleotide"

SEQ ID NO: 524 - DNA, 50 bp, Artificial Sequence
  source: /note="Description of Artificial Sequence: Synthetic oligonucleotide"
aacattaacttggtgtatcgattggtttttgccatatatatatatataag

SEQ ID NO: 525 - DNA, 50 bp, Artificial Sequence; identical to SEQ ID NO: 524
  source: /note="Description of Artificial Sequence: Synthetic oligonucleotide"

SEQ ID NO: 526 - DNA, 50 bp, Artificial Sequence
  source: /note="Description of Artificial Sequence: Synthetic oligonucleotide"
cctttgctcctgccagaggttcgccctctcctacttatatatatatatat

SEQ ID NO: 527 - DNA, 50 bp, Artificial Sequence
  source: /note="Description of Artificial Sequence: Synthetic oligonucleotide"
atcctccctttggaatggcacagggtacgtcttcaaggtgtaaaatgctc

SEQ ID NO: 528 - DNA, 50 bp, Artificial Sequence
  source: /note="Description of Artificial Sequence: Synthetic oligonucleotide"
gacatgaaatagttgtcctagcacctgacgcctcgttgtacatcagagac

SEQ ID NO: 529 - DNA, 50 bp, Artificial Sequence
  source: /note="Description of Artificial Sequence: Synthetic oligonucleotide"
atgctcattgccttttcacagaactttctgtgcgacgtggtttattccca

SEQ ID NO: 530 - DNA, 50 bp, Artificial Sequence
  source: /note="Description of Artificial Sequence: Synthetic oligonucleotide"
ctggacagtcacctctctctgaaggaattctgaggcaagggttgcatact

SEQ ID NO: 531 - DNA, 50 bp, Artificial Sequence; identical to SEQ ID NO: 529
  source: /note="Description of Artificial Sequence: Synthetic oligonucleotide"

SEQ ID NO: 532 - DNA, 50 bp, Artificial Sequence
  source: /note="Description of Artificial Sequence: Synthetic oligonucleotide"
agagaggaagaaggacgactatgtagtgaacaagttaggcttcttttcca

SEQ ID NO: 533 - DNA, 50 bp, Artificial Sequence; identical to SEQ ID NO: 528
  source: /note="Description of Artificial Sequence: Synthetic oligonucleotide"

SEQ ID NO: 534 - DNA, 50 bp, Artificial Sequence
  source: /note="Description of Artificial Sequence: Synthetic oligonucleotide"
ttagagcctctggctagggagcaggctggggactaggtaccccattctag

SEQ ID NO: 535 - DNA, 50 bp, Artificial Sequence
  source: /note="Description of Artificial Sequence: Synthetic oligonucleotide"
ctttgctttcctggtgagcccatccccctatgagctttgtgctgtgcccc

SEQ ID NO: 536 - DNA, 50 bp, Artificial Sequence
  source: /note="Description of Artificial Sequence: Synthetic oligonucleotide"
ctttgctttcctggtgagcccatccccctrygagctttgtgctgtgcccc

SEQ ID NO: 537 - DNA, 50 bp, Artificial Sequence
  source: /note="Description of Artificial Sequence: Synthetic oligonucleotide"
tttgctttcctggtgagcccatccccctatgagctttgtgctgtgcccca

SEQ ID NO: 538 - DNA, 50 bp, Artificial Sequence
  source: /note="Description of Artificial Sequence: Synthetic oligonucleotide"
tttgctttcctggtgagcccatccccctrygagctttgtgctgtgcccca

SEQ ID NO: 539 - DNA, 50 bp, Artificial Sequence
  source: /note="Description of Artificial Sequence: Synthetic oligonucleotide"
acagccccggcccagccaccatggtgtctttgcyttyctggtgascccat

SEQ ID NO: 540 - DNA, 50 bp, Artificial Sequence
  source: /note="Description of Artificial Sequence: Synthetic oligonucleotide"
cagccccggcccagccaccatggtgtctttgctttcctggtgagcccatt

SEQ ID NO: 541 - DNA, 50 bp, Artificial Sequence; identical to SEQ ID NO: 540
  source: /note="Description of Artificial Sequence: Synthetic oligonucleotide"

SEQ ID NO: 542 - DNA, 50 bp, Artificial Sequence
  source: /note="Description of Artificial Sequence: Synthetic oligonucleotide"
ttctcggtgcccactggacagccccggcccagccaccatggtgtctttgg

SEQ ID NO: 543 - DNA, 50 bp, Artificial Sequence; identical to SEQ ID NO: 542
  source: /note="Description of Artificial Sequence: Synthetic oligonucleotide"

SEQ ID NO: 544 - DNA, 50 bp, Artificial Sequence; identical to SEQ ID NO: 542
  source: /note="Description of Artificial Sequence: Synthetic oligonucleotide"

SEQ ID NO: 545 - DNA, 50 bp, Artificial Sequence
  source: /note="Description of Artificial Sequence: Synthetic oligonucleotide"
gcttctcggtgcccactggacagccccggcccagccaccatggtgtcttt

SEQ ID NO: 546 - DNA, 50 bp, Artificial Sequence; identical to SEQ ID NO: 545
  source: /note="Description of Artificial Sequence: Synthetic oligonucleotide"

SEQ ID NO: 547 - DNA, 50 bp, Artificial Sequence; identical to SEQ ID NO: 545
  source: /note="Description of Artificial Sequence: Synthetic oligonucleotide"

SEQ ID NO: 548 - DNA, 50 bp, Artificial Sequence
  source: /note="Description of Artificial Sequence: Synthetic oligonucleotide"
cggggcacagcacaaagctcatagggggatgggctcaccaggaaagcaaa

SEQ ID NO: 549 - DNA, 50 bp, Artificial Sequence
  source: /note="Description of Artificial Sequence: Synthetic oligonucleotide"
gcggggcacagcacaaagctcatagggggatgggctcaccaggaaagcaa

SEQ ID NO: 550 - DNA, 50 bp, Artificial Sequence; identical to SEQ ID NO: 549
  source: /note="Description of Artificial Sequence: Synthetic oligonucleotide"

SEQ ID NO: 551 - DNA, 50 bp, Artificial Sequence
  source: /note="Description of Artificial Sequence: Synthetic oligonucleotide"
acagcacaaagctcatagggggatgggctcaccaggaaagcaaagacacc

SEQ ID NO: 552 - DNA, 50 bp, Artificial Sequence
  source: /note="Description of Artificial Sequence: Synthetic oligonucleotide"
acagcacaaagctcatagggggatgggctcaccaggaaagyramgacacc

SEQ ID NO: 553 - DNA, 50 bp, Artificial Sequence
  source: /note="Description of Artificial Sequence: Synthetic oligonucleotide"
gcacttcagcttctcggtgcccactggacagccccggcccagccaccatg

SEQ ID NO: 554 - DNA, 50 bp, Artificial Sequence; identical to SEQ ID NO: 551
  source: /note="Description of Artificial Sequence: Synthetic oligonucleotide"

SEQ ID NO: 555 - DNA, 50 bp, Artificial Sequence
  source: /note="Description of Artificial Sequence: Synthetic oligonucleotide"
cagcacttcagcttctcggtgcccactggacagccccggcccagccacca

SEQ ID NO: 556 - DNA, 50 bp, Artificial Sequence; identical to SEQ ID NO: 555
  source: /note="Description of Artificial Sequence: Synthetic oligonucleotide"

SEQ ID NO: 557 - DNA, 50 bp, Artificial Sequence
  source: /note="Description of Artificial Sequence: Synthetic oligonucleotide"
cagcacaaagctcatagggggatggggtcaccaggaaagcaaagacacca

SEQ ID NO: 558 - DNA, 50 bp, Artificial Sequence
  source: /note="Description of Artificial Sequence: Synthetic oligonucleotide"
gcagcacttcagcttctcggtgcccactggacagccccggcccagccacc

SEQ ID NO: 559 - DNA, 50 bp, Artificial Sequence; identical to SEQ ID NO: 558
  source: /note="Description of Artificial Sequence: Synthetic oligonucleotide"

SEQ ID NO: 560 - DNA, 50 bp, Artificial Sequence
  source: /note="Description of Artificial Sequence: Synthetic oligonucleotide"
agcacaaagctcatagggggatgggctcaccaggaaagcaaagacaccat

SEQ ID NO: 561 - DNA, 50 bp, Artificial Sequence
  source: /note="Description of Artificial Sequence: Synthetic oligonucleotide"
catagggggatgggctcaccaggaaagcaaagacaccmkrgtggctgggc

SEQ ID NO: 562 - DNA, 50 bp, Artificial Sequence
  source: /note="Description of Artificial Sequence: Synthetic oligonucleotide"
atagggggatgggctcaccaggaaagcaaagacaccatggtggctgggct

SEQ ID NO: 563 - DNA, 50 bp, Artificial Sequence
  source: /note="Description of Artificial Sequence: Synthetic oligonucleotide"
atagggggatgggctcaccaggaaagcaaagacaccmkrgtggctgggct

SEQ ID NO: 564 - DNA, 50 bp, Artificial Sequence
  source: /note="Description of Artificial Sequence: Synthetic oligonucleotide"
acctccctgctgcagcacttcagcttctcggtgcccactggacagcccca

SEQ ID NO: 565 - DNA, 50 bp, Artificial Sequence
  source: /note="Description of Artificial Sequence: Synthetic oligonucleotide"
catagagggatgggctcaccaggaaagcaaagacaccatggtggctgggc

SEQ ID NO: 566 - DNA, 50 bp, Artificial Sequence
  source: /note="Description of Artificial Sequence: Synthetic oligonucleotide"
aggaaagcaaagacaccatggtggctgggccggggctgtccagtgggcac

SEQ ID NO: 567 - DNA, 50 bp, Artificial Sequence
  source: /note="Description of Artificial Sequence: Synthetic oligonucleotide"
ctcaccaggaaagcaaagacaccatggtggctgggccggggctgtccagt

SEQ ID NO: 568 - DNA, 50 bp, Artificial Sequence
  source: /note="Description of Artificial Sequence: Synthetic oligonucleotide"
aaagcaaagacaccatggtggctgggccggggctgtccagtgggcaccga

SEQ ID NO: 569 - DNA, 50 bp, Artificial Sequence
  source: /note="Description of Artificial Sequence: Synthetic oligonucleotide"
gctcaccaggaaagcaaagacaccatggtggctgggccggggctgtccaa

SEQ ID NO: 570 - DNA, 50 bp, Artificial Sequence
  source: /note="Description of Artificial Sequence: Synthetic oligonucleotide"
ccatggtggctgggccggggctgtccagtgggcaccgagaagctgaagtg

SEQ ID NO: 571 - DNA, 50 bp, Artificial Sequence; identical to SEQ ID NO: 570
  source: /note="Description of Artificial Sequence: Synthetic oligonucleotide"

SEQ ID NO: 572 - DNA, 50 bp, Artificial Sequence
  source: /note="Description of Artificial Sequence: Synthetic oligonucleotide"
gcccctggcccgcatggagctcttcctcttcttcacctccctgctgcagc

SEQ ID NO: 573 - DNA, 50 bp, Artificial Sequence
  source: /note="Description of Artificial Sequence: Synthetic oligonucleotide"
ggggctgtccagtgggcaccgagaagctgaagtgctgcagcagggaggtt

SEQ ID NO: 574 - DNA, 50 bp, Artificial Sequence
  source: /note="Description of Artificial Sequence: Synthetic oligonucleotide"
cggggctgtccagtgggcaccgagaagctgaagtgctgcagcagggaggt

SEQ ID NO: 575 - DNA, 50 bp, Artificial Sequence; identical to SEQ ID NO: 574
  source: /note="Description of Artificial Sequence: Synthetic oligonucleotide"

SEQ ID NO: 576 - DNA, 50 bp, Artificial Sequence
  source: /note="Description of Artificial Sequence: Synthetic oligonucleotide"
agaagctgaagtgctgcagcagggaggtgaagaagaggaagagctccatg

SEQ ID NO: 577 - DNA, 50 bp, Artificial Sequence
  source: /note="Description of Artificial Sequence: Synthetic oligonucleotide"
agaagctgaagtgctgcagcagggaggtkaagaagaggaagagctccatg

SEQ ID NO: 578 - DNA, 50 bp, Artificial Sequence
  source: /note="Description of Artificial Sequence: Synthetic oligonucleotide"
gaagctgaagtgctgcagcagggaggtkaagaagaggaagagctccatgt

SEQ ID NO: 579 - DNA, 50 bp, Artificial Sequence
  source: /note="Description of Artificial Sequence: Synthetic oligonucleotide"
cagcagggaggtgaagaagaggaagagctccatgcgggccaggggctccc

SEQ ID NO: 580 - DNA, 50 bp, Artificial Sequence; identical to SEQ ID NO: 579
  source: /note="Description of Artificial Sequence: Synthetic oligonucleotide"

SEQ ID NO: 581 - DNA, 50 bp, Artificial Sequence; identical to SEQ ID NO: 579
  source: /note="Description of Artificial Sequence: Synthetic oligonucleotide"

SEQ ID NO: 582 - DNA, 50 bp, Artificial Sequence
  source: /note="Description of Artificial Sequence: Synthetic oligonucleotide"
tgaagaagaggaagagctccatgcgggccaggggctccccgaggcatgca

SEQ ID NO: 583 - DNA, 50 bp, Artificial Sequence; identical to SEQ ID NO: 582
  source: /note="Description of Artificial Sequence: Synthetic oligonucleotide"

SEQ ID NO: 584 - DNA, 50 bp, Artificial Sequence; identical to SEQ ID NO: 582
  source: /note="Description of Artificial Sequence: Synthetic oligonucleotide"

SEQ ID NO: 585 - DNA, 50 bp, Artificial Sequence
  source: /note="Description of Artificial Sequence: Synthetic oligonucleotide"
gaagaagaggaagagctccatgcgggccaggggctccccgaggcatgcac

SEQ ID NO: 586 - DNA, 50 bp, Artificial Sequence; identical to SEQ ID NO: 585
  source: /note="Description of Artificial Sequence: Synthetic oligonucleotide"

SEQ ID NO: 587 - DNA, 50 bp, Artificial Sequence
  source: /note="Description of Artificial Sequence: Synthetic oligonucleotide"
gaagaagaggaagagctccatgcgggacagaggctcaccgaggcatgcac

SEQ ID NO: 588 - DNA, 50 bp, Artificial Sequence
  source: /note="Description of Artificial Sequence: Synthetic oligonucleotide"
agaagaggaagagctccatgcgggccaggggctccccgaggcatgcacgg

SEQ ID NO: 589 - DNA, 50 bp, Artificial Sequence
  source: /note="Description of Artificial Sequence: Synthetic oligonucleotide"
agaagagtaagagctccatgctggtcagcggctccccgaggcatgcacgg

SEQ ID NO: 590 - DNA, 50 bp, Artificial Sequence
  source: /note="Description of Artificial Sequence: Synthetic oligonucleotide"
ggggtatcacccaggagccaggctcactgacgcccctcccctccccacag

SEQ ID NO: 591 - DNA, 50 bp, Artificial Sequence; identical to SEQ ID NO: 590
  source: /note="Description of Artificial Sequence: Synthetic oligonucleotide"

SEQ ID NO: 592 - DNA, 50 bp, Artificial Sequence
  source: /note="Description of Artificial Sequence: Synthetic oligonucleotide"
ccgcttccaccccgaacacttcctggatgccyagggccactttgtgaagc

SEQ ID NO: 593 - DNA, 50 bp, Artificial Sequence
  source: /note="Description of Artificial Sequence: Synthetic oligonucleotide"
gggagccgggctccccacaggcacctgctgagaaaggcaggaaggcctcc

SEQ ID NO: 594 - DNA, 50 bp, Artificial Sequence
  source: /note="Description of Artificial Sequence: Synthetic oligonucleotide"
ccgtctgggagaagcccttccgcttccaccccgaacacttcctggatgcc

SEQ ID NO: 595 - DNA, 50 bp, Artificial Sequence; identical to SEQ ID NO: 594
  source: /note="Description of Artificial Sequence: Synthetic oligonucleotide"

SEQ ID NO: 596 - DNA, 50 bp, Artificial Sequence; identical to SEQ ID NO: 594
  source: /note="Description of Artificial Sequence: Synthetic oligonucleotide"

SEQ ID NO: 597 - DNA, 50 bp, Artificial Sequence
  source: /note="Description of Artificial Sequence: Synthetic oligonucleotide"
ggtgctgaaggatgaggccgtctgggagaagcccttccgcttccaccccc

SEQ ID NO: 598 - DNA, 50 bp, Artificial Sequence
  source: /note="Description of Artificial Sequence: Synthetic oligonucleotide"
cggcttcacaaagtggccctgggcatccrggaagtgttbggggtggaagc

SEQ ID NO: 599 - DNA, 50 bp, Artificial Sequence
  source: /note="Description of Artificial Sequence: Synthetic oligonucleotide"
cggcttcacaaagtggccctgggcatccaggaagtgttcggggtggaagc

SEQ ID NO: 600 - DNA, 50 bp, Artificial Sequence; identical to SEQ ID NO: 599
  source: /note="Description of Artificial Sequence: Synthetic oligonucleotide"

SEQ ID NO: 601 - DNA, 50 bp, Artificial Sequence
  source: /note="Description of Artificial Sequence: Synthetic oligonucleotide"
catcttctgcccagggaacgacactcatcatcaatctgtcatcggtgctg

SEQ ID NO: 602 - DNA, 50 bp, Artificial Sequence
  source: /note="Description of Artificial Sequence: Synthetic oligonucleotide"
catcttctgcccagggaacgacactcatcatcaatctgttatcggtgctg

SEQ ID NO: 603 - DNA, 50 bp, Artificial Sequence
  source: /note="Description of Artificial Sequence: Synthetic oligonucleotide"
gcttctcccagacggcctcatccttcagcaccgatgacaggttggtgatg

SEQ ID NO: 604 - DNA, 50 bp, Artificial Sequence
  source: /note="Description of Artificial Sequence: Synthetic oligonucleotide"
gcttctcccagacggcctcatccttcagcacygatgacaggttggtgatg

SEQ ID NO: 605 - DNA, 50 bp, Artificial Sequence
  source: /note="Description of Artificial Sequence: Synthetic oligonucleotide"
gagtccagtccccactctcaccctgcatctcctgcccagggaacgacact

SEQ ID NO: 606 - DNA, 50 bp, Artificial Sequence
  source: /note="Description of Artificial Sequence: Synthetic oligonucleotide"
ctgggtgtgacccatatgacatcccgtgacatcgaagtacagggcttcca

SEQ ID NO: 607 - DNA, 50 bp, Artificial Sequence
  source: /note="Description of Artificial Sequence: Synthetic oligonucleotide"
tgctggtgctgagctggggtgaggagggcgccaggcctaccttagggatg

SEQ ID NO: 608 - DNA, 50 bp, Artificial Sequence
  source: /note="Description of Artificial Sequence: Synthetic oligonucleotide"
catgccctacaccactgccgtgattcatgaggtgcagcgctttggggaca

SEQ ID NO: 609 - DNA, 50 bp, Artificial Sequence; identical to SEQ ID NO: 608
  source: /note="Description of Artificial Sequence: Synthetic oligonucleotide"

SEQ ID NO: 610 - DNA, 50 bp, Artificial Sequence; identical to SEQ ID NO: 608
  source: /note="Description of Artificial Sequence: Synthetic oligonucleotide"

SEQ ID NO: 611 - DNA, 50 bp, Artificial Sequence
  source: /note="Description of Artificial Sequence: Synthetic oligonucleotide"
ccaggctcacatgccctacaccactgccgtgattcaygaggtgcagcvct

SEQ ID NO: 612 - DNA, 50 bp, Artificial Sequence
  source: /note="Description of Artificial Sequence: Synthetic oligonucleotide"
caggctcacatgccctacaccactgccgtgattcatgaggtgcagcgctt

SEQ ID NO: 613 - DNA, 50 bp, Artificial Sequence; identical to SEQ ID NO: 612
  source: /note="Description of Artificial Sequence: Synthetic oligonucleotide"

SEQ ID NO: 614 - DNA, 50 bp, Artificial Sequence
  source: /note="Description of Artificial Sequence: Synthetic oligonucleotide"
gatagggcaggtgcggcgaccagagatgggtgaccaggctcrcatgccct

SEQ ID NO: 615 - DNA, 50 bp, Artificial Sequence
  source: /note="Description of Artificial Sequence: Synthetic oligonucleotide"
tgtccccaaagcgctgcacctcatgaatcacggcagtggtgyagggcatg

SEQ ID NO: 616 - DNA, 50 bp, Artificial Sequence; identical to SEQ ID NO: 615
  source: /note="Description of Artificial Sequence: Synthetic oligonucleotide"

SEQ ID NO: 617 - DNA, 50 bp, Artificial Sequence
  source: /note="Description of Artificial Sequence: Synthetic oligonucleotide"
gtccccaaagcgctgcacctcatgaatcacggcagtggtgtagggcatgt

SEQ ID NO: 618 - DNA, 50 bp, Artificial Sequence
  source: /note="Description of Artificial Sequence: Synthetic oligonucleotide"
  modified_base (47)..(47): a, c, t, g, unknown or other
tccaggccgtgtccaacaggagatcgacgacgtgatagggcagdtgnggy

SEQ ID NO: 619 - DNA, 50 bp, Artificial Sequence; identical to SEQ ID NO: 618
  source: /note="Description of Artificial Sequence: Synthetic oligonucleotide"
  modified_base (47)..(47): a, c, t, g, unknown or other

SEQ ID NO: 620 - DNA, 50 bp, Artificial Sequence
  source: /note="Description of Artificial Sequence: Synthetic oligonucleotide"
gtccaggccgtgtccaacaggagatcgacgacgtgatagggcaggtgcgg

SEQ ID NO: 621 - DNA, 50 bp, Artificial Sequence
  source: /note="Description of Artificial Sequence: Synthetic oligonucleotide"
acggcagtggtgtagggcatgtgagcctggtcacccatctctggtyrcca

SEQ ID NO: 622 - DNA, 50 bp, Artificial Sequence; identical to SEQ ID NO: 621
  source: /note="Description of Artificial Sequence: Synthetic oligonucleotide"

SEQ ID NO: 623 - DNA, 50 bp, Artificial Sequence
  source: /note="Description of Artificial Sequence: Synthetic oligonucleotide"
ggtgtagggcatgtgagcctggtcacccatctctggtcgccgcacctgcc

SEQ ID NO: 624 - DNA, 50 bp, Artificial Sequence
  source: /note="Description of Artificial Sequence: Synthetic oligonucleotide"
  modified_base (42)..(42): a, c, t, g, unknown or other
ggtgtagggcatgtgagcctggtcacccatctctggtcrccncahctgcc

SEQ ID NO: 625 - DNA, 50 bp, Artificial Sequence
  source: /note="Description of Artificial Sequence: Synthetic oligonucleotide"
gacgcatgtctgtccaggccgtgtccaacaggagatcgacgacgtgataa

SEQ ID NO: 626 - DNA, 50 bp, Artificial Sequence
  source: /note="Description of Artificial Sequence: Synthetic oligonucleotide"
ttgtggggacgcatgtctgtccaggccgtgtccaacaggagatcracrrc

SEQ ID NO: 627 - DNA, 50 bp, Artificial Sequence; identical to SEQ ID NO: 626
  source: /note="Description of Artificial Sequence: Synthetic oligonucleotide"

SEQ ID NO: 628 - DNA, 50 bp, Artificial Sequence; identical to SEQ ID NO: 626
  source: /note="Description of Artificial Sequence: Synthetic oligonucleotide"

SEQ ID NO: 629 - DNA, 50 bp, Artificial Sequence
  source: /note="Description of Artificial Sequence: Synthetic oligonucleotide"
cattgtggggacgcatgtctgtccaggccgtgtccaacaggmgatcracr

SEQ ID NO: 630 - DNA, 50 bp, Artificial Sequence; identical to SEQ ID NO: 629
  source: /note="Description of Artificial Sequence: Synthetic oligonucleotide"

SEQ ID NO: 631 - DNA, 50 bp, Artificial Sequence
  source: /note="Description of Artificial Sequence: Synthetic oligonucleotide"
ccattgtggggacgcatgtctgtccaggccstgtccaacaggmgatcrac

SEQ ID NO: 632 - DNA, 50 bp, Artificial Sequence; identical to SEQ ID NO: 631
  source: /note="Description of Artificial Sequence: Synthetic oligonucleotide"

SEQ ID NO: 633 - DNA, 50 bp, Artificial Sequence
  source: /note="Description of Artificial Sequence: Synthetic oligonucleotide"
cattgtggggacgcatgtctgtccaggccgtgtccaacaggagatcgaca

SEQ ID NO: 634 - DNA, 50 bp, Artificial Sequence
  source: /note="Description of Artificial Sequence: Synthetic oligonucleotide"
ggaccccctgggtgctgacccattgtggggacgcatgtctgtccaggccg

SEQ ID NO: 635 - DNA, 50 bp, Artificial Sequence; identical to SEQ ID NO: 634
  source: /note="Description of Artificial Sequence: Synthetic oligonucleotide"

SEQ ID NO: 636 - DNA, 50 bp, Artificial Sequence; identical to SEQ ID NO: 634
  source: /note="Description of Artificial Sequence: Synthetic oligonucleotide"

SEQ ID NO: 637 - DNA, 50 bp, Artificial Sequence
  source: /note="Description of Artificial Sequence: Synthetic oligonucleotide"
cggatgtgcagcgtgagacaatctgggaaacagtgcatgtgccgagggag

SEQ ID NO: 638 - DNA, 50 bp, Artificial Sequence
  source: /note="Description of Artificial Sequence: Synthetic oligonucleotide"
cgtatgtgcagcgtgagacaatctgggaaacagtgcatgtgccgagggag

SEQ ID NO: 639 - DNA, 50 bp, Artificial Sequence; identical to SEQ ID NO: 638
  source: /note="Description of Artificial Sequence: Synthetic oligonucleotide"

SEQ ID NO: 640 - DNA, 50 bp, Artificial Sequence
  source: /note="Description of Artificial Sequence: Synthetic oligonucleotide"
cctgtacccttcctccctcggcccctgcactgtttcccagatgggctcac

SEQ ID NO: 641 - DNA, 50 bp, Artificial Sequence; identical to SEQ ID NO: 640
  source: /note="Description of Artificial Sequence: Synthetic oligonucleotide"

SEQ ID NO: 642 - DNA, 50 bp, Artificial Sequence; identical to SEQ ID NO: 640
  source: /note="Description of Artificial Sequence: Synthetic oligonucleotide"

SEQ ID NO: 643 - DNA, 50 bp, Artificial Sequence
  source: /note="Description of Artificial Sequence: Synthetic oligonucleotide"
tacccttcctccctcggcccctgcactgtttcccagatgggctcacgctg

SEQ ID NO: 644 - DNA, 50 bp, Artificial Sequence; identical to SEQ ID NO: 643
  source: /note="Description of Artificial Sequence: Synthetic oligonucleotide"

SEQ ID NO: 645 - DNA, 50 bp, Artificial Sequence; identical to SEQ ID NO: 643
  source: /note="Description of Artificial Sequence: Synthetic oligonucleotide"

SEQ ID NO: 646 - DNA, 50 bp, Artificial Sequence
  source: /note="Description of Artificial Sequence: Synthetic oligonucleotide"
tcctccctcggccactgcactgtttcccagacaggctcacgctgcacatc

SEQ ID NO: 647 - DNA, 50 bp, Artificial Sequence
  source: /note="Description of Artificial Sequence: Synthetic oligonucleotide"
accacctcgaccacgctggcctggtgcctcctgctcatgatcctacatcc

SEQ ID NO: 648 - DNA, 50 bp, Artificial Sequence
  source: /note="Description of Artificial Sequence: Synthetic oligonucleotide"
accacctcgaccacactgacctggcgcctcctgctcatgatcctacatcc

SEQ ID NO: 649 - DNA, 50 bp, Artificial Sequence
  source: /note="Description of Artificial Sequence: Synthetic oligonucleotide"
ccctcggcccctgcactgtttcccagatgggctcacgctgcacatccgga

SEQ ID NO: 650 - DNA, 50 bp, Artificial Sequence; identical to SEQ ID NO: 649
  source: /note="Description of Artificial Sequence: Synthetic oligonucleotide"

SEQ ID NO: 651 - DNA, 50 bp, Artificial Sequence; identical to SEQ ID NO: 649
  source: /note="Description of Artificial Sequence: Synthetic oligonucleotide"

SEQ ID NO: 652 - DNA, 50 bp, Artificial Sequence
  source: /note="Description of Artificial Sequence: Synthetic oligonucleotide"
atccggatgtaggatcatgagcaggaggccccaggccagcgtggtcgagg

SEQ ID NO: 653 - DNA, 50 bp, Artificial Sequence; identical to SEQ ID NO: 652
  source: /note="Description of Artificial Sequence: Synthetic oligonucleotide"

SEQ ID NO: 654 - DNA, 50 bp, Artificial Sequence; identical to SEQ ID NO: 652
  source: /note="Description of Artificial Sequence: Synthetic oligonucleotide"

SEQ ID NO: 655 - DNA, 50 bp, Artificial Sequence
  source: /note="Description of Artificial Sequence: Synthetic oligonucleotide"
gaggccccaggccagcgtggtcgaggyggtcaccatcccggcagagaaca

SEQ ID NO: 656 - DNA, 50 bp, Artificial Sequence
  source: /note="Description of Artificial Sequence: Synthetic oligonucleotide"
ccctgagagcagcttcaatgatgagaacctgcgcatagtggtggctgacc

SEQ ID NO: 657 - DNA, 50 bp, Artificial Sequence
  source: /note="Description of Artificial Sequence: Synthetic oligonucleotide"
ccctgagagcagcttcaatgatgagaacctgygcmtagtggtggctgacc

SEQ ID NO: 658 - DNA, 50 bp, Artificial Sequence
  source: /note="Description of Artificial Sequence: Synthetic oligonucleotide"
gtggtcgaggtggtcaccatcccggcagagaacaggtcagccaccactat

SEQ ID NO: 659 - DNA, 50 bp, Artificial Sequence; identical to SEQ ID NO: 658
  source: /note="Description of Artificial Sequence: Synthetic oligonucleotide"

SEQ ID NO: 660 - DNA, 50 bp, Artificial Sequence
  source: /note="Description of Artificial Sequence: Synthetic oligonucleotide"
cgtggtcgaggtggtcaccatcccggcagagaacaggtcagccaccacta

SEQ ID NO: 661 - DNA, 50 bp, Artificial Sequence
  source: /note="Description of Artificial Sequence: Synthetic oligonucleotide"
ctgctcaggccaaggggaaccctgagagcagcttcaatgatgagaacctg

SEQ ID NO: 662 - DNA, 50 bp, Artificial Sequence
  source: /note="Description of Artificial Sequence: Synthetic oligonucleotide"
tgtcccgagtatgctctcggccctgctcaggccaaggggarccctgagag

SEQ ID NO: 663 - DNA, 50 bp, Artificial Sequence; identical to SEQ ID NO: 662
  source: /note="Description of Artificial Sequence: Synthetic oligonucleotide"

SEQ ID NO: 664 - DNA, 50 bp, Artificial Sequence
  source: /note="Description of Artificial Sequence: Synthetic oligonucleotide"
taccccgttctgtcccgagtatgctctcggccctgctcaggccaagggga

SEQ ID NO: 665 - DNA, 50 bp, Artificial Sequence
  source: /note="Description of Artificial Sequence: Synthetic oligonucleotide"
accccgttctgtcccgagtatgctctcggccctgctcaggccaaggggaa

SEQ ID NO: 666 - DNA, 50 bp, Artificial Sequence; identical to SEQ ID NO: 665
  source: /note="Description of Artificial Sequence: Synthetic oligonucleotide"

SEQ ID NO: 667 - DNA, 50 bp, Artificial Sequence; identical to SEQ ID NO: 664
  source: /note="Description of Artificial Sequence: Synthetic oligonucleotide"

SEQ ID NO: 668 - DNA, 50 bp, Artificial Sequence; identical to SEQ ID NO: 664
  source: /note="Description of Artificial Sequence: Synthetic oligonucleotide"

SEQ ID NO: 669 - DNA, 50 bp, Artificial Sequence
  source: /note="Description of Artificial Sequence: Synthetic oligonucleotide"
cagcccagcccccctgagacttgactgagtccttcctggcagagatggag

SEQ ID NO: 670 - DNA, 50 bp, Artificial Sequence; identical to SEQ ID NO: 669
  source: /note="Description of Artificial Sequence: Synthetic oligonucleotide"

SEQ ID NO: 671 - DNA, 50 bp, Artificial Sequence; identical to SEQ ID NO: 669
  source: /note="Description of Artificial Sequence: Synthetic oligonucleotide"

SEQ ID NO: 672 - DNA, 50 bp, Artificial Sequence
  source: /note="Description of Artificial Sequence: Synthetic oligonucleotide"
gacccagcccagcccccccgagacctgactgaggccttcctkgcaragaa

SEQ ID NO: 673 - DNA, 50 bp, Artificial Sequence; identical to SEQ ID NO: 672
  source: /note="Description of Artificial Sequence: Synthetic oligonucleotide"

SEQ ID NO: 674 - DNA, 50 bp, Artificial Sequence
  source: /note="Description of Artificial Sequence: Synthetic oligonucleotide"
cctgggacccagcccagcccccccgagacctgactgaggccttcctkgca

SEQ ID NO: 675 - DNA, 50 bp, Artificial Sequence
  source: /note="Description of Artificial Sequence: Synthetic oligonucleotide"
caccgtggcagccactctcaccttctccatctctgccaggaaggcctcag

SEQ ID NO: 676 - DNA, 50 bp, Artificial Sequence; identical to SEQ ID NO: 675
  source: /note="Description of Artificial Sequence: Synthetic oligonucleotide"

SEQ ID NO: 677 - DNA, 50 bp, Artificial Sequence
  source: /note="Description of Artificial Sequence: Synthetic oligonucleotide"
atgagctgctaactgagcacaggatgacctgggacccagcccagcccccc

SEQ ID NO: 678 - DNA, 50 bp, Artificial Sequence
  source: /note="Description of Artificial Sequence: Synthetic oligonucleotide"
atgagctgctaactgagcacaggatgacctgggacccagcccagcmmycc

SEQ ID NO: 679 - DNA, 50 bp, Artificial Sequence; identical to SEQ ID NO: 677
  source: /note="Description of Artificial Sequence: Synthetic oligonucleotide"

SEQ ID NO: 680 - DNA, 50 bp, Artificial Sequence
  source: /note="Description of Artificial Sequence: Synthetic oligonucleotide"
tgctaactgagcacaggatgacctgggacccagcccagcccyccyragac

SEQ ID NO: 681 - DNA, 50 bp, Artificial Sequence; identical to SEQ ID NO: 680
  source: /note="Description of Artificial Sequence: Synthetic oligonucleotide"

SEQ ID NO: 682 - DNA, 50 bp, Artificial Sequence
  source: /note="Description of Artificial Sequence: Synthetic oligonucleotide"
tgctaactgagcacaggatgacctgggacccagcccagcccccccgagac

SEQ ID NO: 683 - DNA, 50 bp, Artificial Sequence
  source: /note="Description of Artificial Sequence: Synthetic oligonucleotide"
ctgccaggaaggcctcagtcaggtctcgggggggctgggctgggtcccag

SEQ ID NO: 684 - DNA, 50 bp, Artificial Sequence
  source: /note="Description of Artificial Sequence: Synthetic oligonucleotide"
gaaggcctcagtcaggtctcgggggggctgggctgggtcccaggtcatcc

SEQ ID NO: 685 - DNA, 50 bp, Artificial Sequence
  source: /note="Description of Artificial Sequence: Synthetic oligonucleotide"
gaaggcctcagtcaggtctcgggggkgctgggctgggtcccagrtcatcc

SEQ ID NO: 686 - DNA, 50 bp, Artificial Sequence
  source: /note="Description of Artificial Sequence: Synthetic oligonucleotide"
agtcaggtctcgggggggctgggctgggtcccaggtcatcctgtgctcag

SEQ ID NO: 687 - DNA, 50 bp, Artificial Sequence
  source: /note="Description of Artificial Sequence: Synthetic oligonucleotide"
agtcaggtctcgggggggctgggctgggtcccagrtcatcctgtgctcag

SEQ ID NO: 688 - DNA, 50 bp, Artificial Sequence
  source: /note="Description of Artificial Sequence: Synthetic oligonucleotide"
aaggtcctacgcttccaaaaggctttcctgacccagctggatgagctgct

SEQ ID NO: 689 - DNA, 50 bp, Artificial Sequence
  source: /note="Description of Artificial Sequence: Synthetic oligonucleotide"
ggctgggtcccaggtcatcctgtgctcagttagcagctcatccagctggg

SEQ ID NO: 690 - DNA, 50 bp, Artificial Sequence; identical to SEQ ID NO: 689
  source: /note="Description of Artificial Sequence: Synthetic oligonucleotide"

SEQ ID NO: 691 - DNA, 50 bp, Artificial Sequence; identical to SEQ ID NO: 689
  source: /note="Description of Artificial Sequence: Synthetic oligonucleotide"

SEQ ID NO: 692 - DNA, 50 bp, Artificial Sequence
  source: /note="Description of Artificial Sequence: Synthetic oligonucleotide"
tggtgtaggtgctgaatgctgtccccgtcctcctgcatatcccagcgctg

SEQ ID NO: 693 - DNA, 50 bp, Artificial Sequence; identical to SEQ ID NO: 692
  source: /note="Description of Artificial Sequence: Synthetic oligonucleotide"

SEQ ID NO: 694 - DNA, 50 bp, Artificial Sequence; identical to SEQ ID NO: 692
  source: /note="Description of Artificial Sequence: Synthetic oligonucleotide"

SEQ ID NO: 695 - DNA, 50 bp, Artificial Sequence
  source: /note="Description of Artificial Sequence: Synthetic oligonucleotide"
ggaaagccttttggaagcgtaggaccttgccagmcarcgctgggatrtgc

SEQ ID NO: 696 - DNA, 50 bp, Artificial Sequence
  source: /note="Description of Artificial Sequence: Synthetic oligonucleotide"
gaaagccttttggaagcgtaggaccttgccagmcarcgctgggatrtgca

SEQ ID NO: 697 - DNA, 50 bp, Artificial Sequence; identical to SEQ ID NO: 696
  source: /note="Description of Artificial Sequence: Synthetic oligonucleotide"

SEQ ID NO: 698 - DNA, 50 bp, Artificial Sequence
  source: /note="Description of Artificial Sequence: Synthetic oligonucleotide"
ttcctcaggctgctggacctagctcaggagggactgaaggaggagtcggg

SEQ ID NO: 699 - DNA, 50 bp, Artificial Sequence; identical to SEQ ID NO: 698
  source: /note="Description of Artificial Sequence: Synthetic oligonucleotide"

SEQ ID NO: 700 - DNA, 50 bp, Artificial Sequence
  source: /note="Description of Artificial Sequence: Synthetic oligonucleotide"
gtacgacgaccctcgcttcctcaggctgctggacctagctcaggaggvay

SEQ ID NO: 701 - DNA, 50 bp, Artificial Sequence
  source: /note="Description of Artificial Sequence: Synthetic oligonucleotide"
gtctctcgctccgcacctcgcgcagaaagcccgactcctccttcrrtbcc

SEQ ID NO: 702 - DNA, 50 bp, Artificial Sequence
  source: /note="Description of Artificial Sequence: Synthetic oligonucleotide"
gtctctcgctccgcacctcgcgcagaaagcccgactcctccttcagtccc

SEQ ID NO: 703 - DNA, 50 bp, Artificial Sequence; identical to SEQ ID NO: 702
  source: /note="Description of Artificial Sequence: Synthetic oligonucleotide"

SEQ ID NO: 704 - DNA, 50 bp, Artificial Sequence
  source: /note="Description of Artificial Sequence: Synthetic oligonucleotide"
ccgactcctccttcagtccctcctgagctaggtccagcagcctgaggaag

SEQ ID NO: 705 - DNA, 50 bp, Artificial Sequence; identical to SEQ ID NO: 704
  source: /note="Description of Artificial Sequence: Synthetic oligonucleotide"

SEQ ID NO: 706 - DNA, 50 bp, Artificial Sequence; identical to SEQ ID NO: 704
  source: /note="Description of Artificial Sequence: Synthetic oligonucleotide"

SEQ ID NO: 707 - DNA, 50 bp, Artificial Sequence
  source: /note="Description of Artificial Sequence: Synthetic oligonucleotide"
ggtccagcagcctgaggaagcgagggtcgtcgtactcgaagcggcgcccg

SEQ ID NO: 708 - DNA, 50 bp, Artificial Sequence
  source: /note="Description of Artificial Sequence: Synthetic oligonucleotide"
gtccagcagcctgaggaagcgagggtcgtcgtactcgaagcggcgcccga

SEQ ID NO: 709 - DNA, 50 bp, Artificial Sequence
  source: /note="Description of Artificial Sequence: Synthetic oligonucleotide"
aacggtctcttggacaaagccgtgagcaacgtgatcgcctccctcacctt

SEQ ID NO: 710 - DNA, 50 bp, Artificial Sequence
  source: /note="Description of Artificial Sequence: Synthetic oligonucleotide"
tccagcagcctgaggaagcgagggtcgtcgtactcgaagcggcgcccgca

SEQ ID NO: 711 - DNA, 50 bp, Artificial Sequence
  source: /note="Description of Artificial Sequence: Synthetic oligonucleotide"
ccaacggtctcttggacaaagccgtgagcaacgtgatcgcctccctcacc

SEQ ID NO: 712 - DNA, 50 bp, Artificial Sequence
  source: /note="Description of Artificial Sequence: Synthetic oligonucleotide"
caacggtctcttggacaaagccgtgagcaacgtgatcgcctccctcacct

SEQ ID NO: 713 - DNA, 50 bp, Artificial Sequence
  source: /note="Description of Artificial Sequence: Synthetic oligonucleotide"
ggcgaccccttacccgcatctcccacccccargacgcccctttygcccca

SEQ ID NO: 714 - DNA, 50 bp, Artificial Sequence; identical to SEQ ID NO: 713
  source: /note="Description of Artificial Sequence: Synthetic oligonucleotide"

SEQ ID NO: 715 - DNA, 50 bp, Artificial Sequence
  source: /note="Description of Artificial Sequence: Synthetic oligonucleotide"
gaaggcgggggacggggaaggcgaccccttacccgcatctcccaccccca

SEQ ID NO: 716 - DNA, 50 bp, Artificial Sequence; identical to SEQ ID NO: 715
  source: /note="Description of Artificial Sequence: Synthetic oligonucleotide"

SEQ ID NO: 717 - DNA, 50 bp, Artificial Sequence
  source: /note="Description of Artificial Sequence: Synthetic oligonucleotide"
ggtgaccgaggaggccgcctgcctttgtgccgccttcgccaaccactcca

SEQ ID NO: 718 - DNA, 50 bp, Artificial Sequence; identical to SEQ ID NO: 717
  source: /note="Description of Artificial Sequence: Synthetic oligonucleotide"

SEQ ID NO: 719 - DNA, 50 bp, Artificial Sequence
  source: /note="Description of Artificial Sequence: Synthetic oligonucleotide"
gggtgaccgaggaggccgcctgcctttgtgccgccttcgccaaccactcc

SEQ ID NO: 720 - DNA, 50 bp, Artificial Sequence
  source: /note="Description of Artificial Sequence: Synthetic oligonucleotide"
ccccgccttcccagttcccgctttgtgcccttctgcccatcacccachrg

SEQ ID NO: 721 - DNA, 50 bp, Artificial Sequence
  source: /note="Description of Artificial Sequence: Synthetic oligonucleotide"
agtgggtgaccgaggaggccgcctgcctttgtgccgccttcgcyraccam

SEQ ID NO: 722 - DNA, 50 bp, Artificial Sequence
  source: /note="Description of Artificial Sequence: Synthetic oligonucleotide"
gtgggtgaccgaggaggccgcctgcctttgtgccgccttcgcyraccamt

SEQ ID NO: 723 - DNA, 50 bp, Artificial Sequence
  source: /note="Description of Artificial Sequence: Synthetic oligonucleotide"
cagtgggtgaccgaggaggccgcctgcctttgtgccgccttcgccaacca

SEQ ID NO: 724 - DNA, 50 bp, Artificial Sequence
  source: /note="Description of Artificial Sequence: Synthetic oligonucleotide"
cagtgggtgaccgaggaggccgcctgcctttstgccgccttcgcyracca

SEQ ID NO: 725 - DNA, 50 bp, Artificial Sequence
  source: /note="Description of Artificial Sequence: Synthetic oligonucleotide"
cttcccagttcccgctttgtgcccttctgcccatcacccaccrgmktggt

SEQ ID NO: 726 - DNA, 50 bp, Artificial Sequence
  source: /note="Description of Artificial Sequence: Synthetic oligonucleotide"
ttcccagttcccgctttgtgcccttctgcccatcacccaccrgmktggtt

SEQ ID NO: 727 - DNA, 50 bp, Artificial Sequence
  source: /note="Description of Artificial Sequence: Synthetic oligonucleotide"
tggagcagtgggtgaccgaggaggccgcctgcctttstgccgccttcgcy

SEQ ID NO: 728 - DNA, 50 bp, Artificial Sequence
  source: /note="Description of Artificial Sequence: Synthetic oligonucleotide"
tttgtgcccttctgcccatcacccaccggagtggttggcgaaggcggcac

SEQ ID NO: 729 - DNA, 50 bp, Artificial Sequence
  source: /note="Description of Artificial Sequence: Synthetic oligonucleotide"
ggcaagaagtcgctggagcagtgggtgaccgaggaggccgcctgcctttg

SEQ ID NO: 730 - DNA, 50 bp, Artificial Sequence
  source: /note="Description of Artificial Sequence: Synthetic oligonucleotide"
ggcaagaagtcgctggagcagtgggtgaccragghggcygcctgcctttg

SEQ ID NO: 731 - DNA, 50 bp, Artificial Sequence; identical to SEQ ID NO: 729
  source: /note="Description of Artificial Sequence: Synthetic oligonucleotide"

SEQ ID NO: 732 - DNA, 50 bp, Artificial Sequence
  source: /note="Description of Artificial Sequence: Synthetic oligonucleotide"
cccatcacccaccggagtggttggcgaaggcggcacaaaggcaggcggcc

SEQ ID NO: 733 - DNA, 50 bp, Artificial Sequence
  source: /note="Description of Artificial Sequence: Synthetic oligonucleotide"
tcacccaccggagtggttggcgaaggcggcacaaaggcaggcggcctcct

SEQ ID NO: 734 - DNA, 50 bp, Artificial Sequence; identical to SEQ ID NO: 733
  source: /note="Description of Artificial Sequence: Synthetic oligonucleotide"

SEQ ID NO: 735 - DNA, 50 bp, Artificial Sequence
  source: /note="Description of Artificial Sequence: Synthetic oligonucleotide"
ccgtgtccaccttgcgcaacttgggcctgggcaagaagtcgctggagcag

SEQ ID NO: 736 - DNA, 50 bp, Artificial Sequence; identical to SEQ ID NO: 735
  source: /note="Description of Artificial Sequence: Synthetic oligonucleotide"

SEQ ID NO: 737 - DNA, 50 bp, Artificial Sequence
  source: /note="Description of Artificial Sequence: Synthetic oligonucleotide"
tggttggcgaaggcggcacaaaggcaggcggcctcctcggtcacccactc

SEQ ID NO: 738 - DNA, 50 bp, Artificial Sequence
  source: /note="Description of Artificial Sequence: Synthetic oligonucleotide"
aggcggcacaaaggcaggcggcctcctyggtcacccactsctccagcgac

SEQ ID NO: 739 - DNA, 50 bp, Artificial Sequence; identical to SEQ ID NO: 738
  source: /note="Description of Artificial Sequence: Synthetic oligonucleotide"

SEQ ID NO: 740 - DNA, 50 bp, Artificial Sequence
  source: /note="Description of Artificial Sequence: Synthetic oligonucleotide"
ggcggcacaaaggcaggcggcctcctcggtcacccactgctccagcgact

SEQ ID NO: 741 - DNA, 50 bp, Artificial Sequence
  source: /note="Description of Artificial Sequence: Synthetic oligonucleotide"
gcccgcgtggcgcgagcagaggcgcttctccgtgtccaccttgcgcaact

SEQ ID NO: 742 - DNA, 50 bp, Artificial Sequence; identical to SEQ ID NO: 741
  source: /note="Description of Artificial Sequence: Synthetic oligonucleotide"

SEQ ID NO: 743 - DNA, 50 bp, Artificial Sequence; identical to SEQ ID NO: 741
  source: /note="Description of Artificial Sequence: Synthetic oligonucleotide"

SEQ ID NO: 744 - DNA, 50 bp, Artificial Sequence
  source: /note="Description of Artificial Sequence: Synthetic oligonucleotide"
gttcctggcgcgctatgggcccgcgtggcgcgagcagaggcgcttctcca

SEQ ID NO: 745 - DNA, 50 bp, Artificial Sequence; identical to SEQ ID NO: 744
  source: /note="Description of Artificial Sequence: Synthetic oligonucleotide"

SEQ ID NO: 746 - DNA, 50 bp, Artificial Sequence; identical to SEQ ID NO: 744
  source: /note="Description of Artificial Sequence: Synthetic oligonucleotide"

SEQ ID NO: 747 - DNA, 50 bp, Artificial Sequence
  source: /note="Description of Artificial Sequence: Synthetic oligonucleotide"
actgctccagcgacttcttgcccaggcccragttgcgcaaggtggasayg

SEQ ID NO: 748 - DNA, 50 bp, Artificial Sequence
  source: /note="Description of Artificial Sequence: Synthetic oligonucleotide"
ggtgttcctggcgcgctatgggcccgcgtggcgcgagcagaggcgcttct

SEQ ID NO: 749 - DNA, 50 bp, Artificial Sequence
  source: /note="Description of Artificial Sequence: Synthetic oligonucleotide"
gtgttcctggcgcgctatgggcccgcgtggcgcgagcagaggcgcttctt

SEQ ID NO: 750 - DNA, 50 bp, Artificial Sequence
  source: /note="Description of Artificial Sequence: Synthetic oligonucleotide"
ccaggcccaagttgcgcaaggtggacacggagaagcgcctctgctcgcgc

SEQ ID NO: 751 - DNA, 50 bp, Artificial Sequence
  source: /note="Description of Artificial Sequence: Synthetic oligonucleotide"
caggcccaagttgcgcaaggtggacacggagaagcgcctctgctcgcgct

SEQ ID NO: 752 - DNA, 50 bp, Artificial Sequence
  source: /note="Description of Artificial Sequence: Synthetic oligonucleotide"
cgtgcccgtcccacccccaggggtgttyctgkcgcgctatgggcccgcgt

SEQ ID NO: 753 - DNA, 50 bp, Artificial Sequence
  source: /note="Description of Artificial Sequence: Synthetic oligonucleotide"
gccttcatggccacgcgcacgtgcccgtcccacccccaggggtgttcctg

SEQ ID NO: 754 - DNA, 50 bp, Artificial Sequence
  source: /note="Description of Artificial Sequence: Synthetic oligonucleotide"
acggagaagcgcctctgctcgcgccacgcgggcccatagcgcgccaggaa

SEQ ID NO: 755 - DNA, 50 bp, Artificial Sequence
  source: /note="Description of Artificial Sequence: Synthetic oligonucleotide"
ggagaagcgcctctgctcgcgccacgcgggcccatagcgcgccaggaaca

SEQ ID NO: 756 - DNA, 50 bp, Artificial Sequence; identical to SEQ ID NO: 755
  source: /note="Description of Artificial Sequence: Synthetic oligonucleotide"

SEQ ID NO: 757 - DNA, 50 bp, Artificial Sequence; identical to SEQ ID NO: 755
  source: /note="Description of Artificial Sequence: Synthetic oligonucleotide"

SEQ ID NO: 758 - DNA, 50 bp, Artificial Sequence
  source: /note="Description of Artificial Sequence: Synthetic oligonucleotide"
aatctgtctctgtccccaccgctgcttgccttgggaacgcggcccraarc

SEQ ID NO: 759 - DNA, 50 bp, Artificial Sequence
  source: /note="Description of Artificial Sequence: Synthetic oligonucleotide"
aatctgtctctgtccccaccgctgcttgccttgggaacgcggcccgaaac

SEQ ID NO: 760 - DNA, 50 bp, Artificial Sequence; identical to SEQ ID NO: 759
  source: /note="Description of Artificial Sequence: Synthetic oligonucleotide"

SEQ ID NO: 761 - DNA, 50 bp, Artificial Sequence
  source: /note="Description of Artificial Sequence: Synthetic oligonucleotide"
tctctgtccccaccgctgcttgccttgggaacgcggcccraarcycagga

SEQ ID NO: 762 - DNA, 50 bp, Artificial Sequence
  source: /note="Description of Artificial Sequence: Synthetic oligonucleotide"
ctctgtccccaccgctgcttgccttgggaacgcggcccgaaacccaggat

SEQ ID NO: 763 - DNA, 50 bp, Artificial Sequence
  source: /note="Description of Artificial Sequence: Synthetic oligonucleotide"
ctctgtccccaccgctgcttgccttgggaacgcggcccraarcycaggat

SEQ ID NO: 764 - DNA, 50 bp, Artificial Sequence
  source: /note="Description of Artificial Sequence: Synthetic oligonucleotide"
ctggtgacccacggcgaggacaccgccgaccgcccgcctgtgcccatcat

SEQ ID NO: 765 - DNA, 50 bp, Artificial Sequence; identical to SEQ ID NO: 764
  source: /note="Description of Artificial Sequence: Synthetic oligonucleotide"

SEQ ID NO: 766 - DNA, 50 bp, Artificial Sequence
  source: /note="Description of Artificial Sequence: Synthetic oligonucleotide"
gctgcttgccttgggaacgcggcccgaaacccaggayctggdwgatgggc

SEQ ID NO: 767 - DNA, 50 bp, Artificial Sequence
  source: /note="Description of Artificial Sequence: Synthetic oligonucleotide"
ctgcttgccttgggaacgcggcccgaaacccaggayctggdwgatgggca

SEQ ID NO: 768 - DNA, 50 bp, Artificial Sequence
  source: /note="Description of Artificial Sequence: Synthetic oligonucleotide"
gcgcgaggcgctggtgacccacggcgaggasacsgccgaccgcccgcctr

SEQ ID NO: 769 - DNA, 50 bp, Artificial Sequence
  source: /note="Description of Artificial Sequence: Synthetic oligonucleotide"
caggatctgggtgatgggcacaggcgggcggtcggcggtgtcctcgccgt

SEQ ID NO: 770 - DNA, 50 bp, Artificial Sequence; identical to SEQ ID NO: 769
  source: /note="Description of Artificial Sequence: Synthetic oligonucleotide"

SEQ ID NO: 771 - DNA, 50 bp, Artificial Sequence; identical to SEQ ID NO: 769
  source: /note="Description of Artificial Sequence: Synthetic oligonucleotide"

SEQ ID NO: 772 - DNA, 50 bp, Artificial Sequence
  source: /note="Description of Artificial Sequence: Synthetic oligonucleotide"
cctggacgccggtggtcgtgctcaatgggctggcggccgtgcgcgaggcg

SEQ ID NO: 773 - DNA, 50 bp, Artificial Sequence; identical to SEQ ID NO: 772
  source: /note="Description of Artificial Sequence: Synthetic oligonucleotide"

SEQ ID NO: 774 - DNA, 50 bp, Artificial Sequence
  source: /note="Description of Artificial Sequence: Synthetic oligonucleotide"
tgatgggcacaggcgggcggtcggcggtstcctcgccgygggtcaccakc

SEQ ID NO: 775 - DNA, 50 bp, Artificial Sequence; identical to SEQ ID NO: 774
  source: /note="Description of Artificial Sequence: Synthetic oligonucleotide"

SEQ ID NO: 776 - DNA, 50 bp, Artificial Sequence; identical to SEQ ID NO: 774
  source: /note="Description of Artificial Sequence: Synthetic oligonucleotide"

SEQ ID NO: 777 - DNA, 50 bp, Artificial Sequence
  source: /note="Description of Artificial Sequence: Synthetic oligonucleotide"
cacaggcgggcggtcggcggtgtcctcgccgygggtcaccakcrcctcgc

SEQ ID NO: 778 - DNA, 50 bp, Artificial Sequence
  source: /note="Description of Artificial Sequence: Synthetic oligonucleotide"
cacaggcgggcggtcggcggtgtcctcgccgtgggtcaccagcgcctcgc

SEQ ID NO: 779 - DNA, 50 bp, Artificial Sequence
  source: /note="Description of Artificial Sequence: Synthetic oligonucleotide"
cagctggcctggacgccggtggtcgtgctcaatgggctggcggccgtgcg

SEQ ID NO: 780 - DNA, 50 bp, Artificial Sequence
  source: /note="Description of Artificial Sequence: Synthetic oligonucleotide"
ggcggtcggcggtgtcctcgccgtgggtcaccagcgcctcgcgcacggcc

SEQ ID NO: 781 - DNA, 50 bp, Artificial Sequence
  source: /note="Description of Artificial Sequence: Synthetic oligonucleotide"
cagcccattgagcacgaccaccggcgtccaggccagctgcaggctgaaca

SEQ ID NO: 782 - DNA, 50 bp, Artificial Sequence
  source: /note="Description of Artificial Sequence: Synthetic oligonucleotide"
acaagaggccctgaccctccctctgcagttgcggcgccgcttcggggacg

SEQ ID NO: 783 - DNA, 50 bp, Artificial Sequence
  source: /note="Description of Artificial Sequence: Synthetic oligonucleotide"
acaagaggccctgaccctccctctgcasttgyggcgccgcttcggggacg

SEQ ID NO: 784 - DNA, 50 bp, Artificial Sequence
  source: /note="Description of Artificial Sequence: Synthetic oligonucleotide"
ctggggtgatcctggcttgacaagaggccctgaccctccctctgcasttg

SEQ ID NO: 785 - DNA, 50 bp, Artificial Sequence
  source: /note="Description of Artificial Sequence: Synthetic oligonucleotide"
ctggggtgatcctggcttgacaagaggccctgaccctccctctgcagttg

SEQ ID NO: 786 - DNA, 50 bp, Artificial Sequence; identical to SEQ ID NO: 785
  source: /note="Description of Artificial Sequence: Synthetic oligonucleotide"

SEQ ID NO: 787 - DNA, 50 bp, Artificial Sequence
  source: /note="Description of Artificial Sequence: Synthetic oligonucleotide"
agtctggggtgatcctggcttgacaagaggccctgaccctccctctgcag

SEQ ID NO: 788 - DNA, 50 bp, Artificial Sequence; identical to SEQ ID NO: 787
  source: /note="Description of Artificial Sequence: Synthetic oligonucleotide"

SEQ ID NO: 789 - DNA, 50 bp, Artificial Sequence
  source: /note="Description of Artificial Sequence: Synthetic oligonucleotide"
cgaagcagtatggtgtgttctggaagtccacatgcagcaggttgcccagc

SEQ ID NO: 790 - DNA, 50 bp, Artificial Sequence
  source: /note="Description of Artificial Sequence: Synthetic oligonucleotide"
gaagcagtatggtgtgttctggaagtccacatgcagcaggttgcccagct

SEQ ID NO: 791 - DNA, 50 bp, Artificial Sequence
  source: /note="Description of Artificial Sequence: Synthetic oligonucleotide"
ggcgccaacgctgggctgcacgctacccaccaggccccctgccactgccc

SEQ ID NO: 792 - DNA, 50 bp, Artificial Sequence; identical to SEQ ID NO: 791
  source: /note="Description of Artificial Sequence: Synthetic oligonucleotide"

SEQ ID NO: 793 - DNA, 50 bp, Artificial Sequence
  source: /note="Description of Artificial Sequence: Synthetic oligonucleotide"
gtccacatgcagcaggttgcccagccygggcagtggcaggggrcctggyg

SEQ ID NO: 794 - DNA, 50 bp, Artificial Sequence
  source: /note="Description of Artificial Sequence: Synthetic oligonucleotide"
gtccacatgcagcaggttgcccagcccgggcagtggcagggggcctggtg

SEQ ID NO: 795 - DNA, 50 bp, Artificial Sequence
  source: /note="Description of Artificial Sequence: Synthetic oligonucleotide"
tgatagtggccatcttcctgctcctggtggacctgatgcaccggcgccaa

SEQ ID NO: 796 - DNA, 50 bp, Artificial Sequence; identical to SEQ ID NO: 795
  source: /note="Description of Artificial Sequence: Synthetic oligonucleotide"

SEQ ID NO: 797 - DNA, 50 bp, Artificial Sequence
  source: /note="Description of Artificial Sequence: Synthetic oligonucleotide"
tgatagtggccatcttcctgctcctggtggacctgatgcacyrgcrccaa

SEQ ID NO: 798 - DNA, 50 bp, Artificial Sequence
  source: /note="Description of Artificial Sequence: Synthetic oligonucleotide"
gccgtgatagtggccatcttcctgctcctggtggacctgatgcaccggca

SEQ ID NO: 799 - DNA, 50 bp, Artificial Sequence
  source: /note="Description of Artificial Sequence: Synthetic oligonucleotide"
gggcagtggcagggggcctggtgggtagcgtgcagcccagcrttggygcc

SEQ ID NO: 800 - DNA, 50 bp, Artificial Sequence; identical to SEQ ID NO: 799
  source: /note="Description of Artificial Sequence: Synthetic oligonucleotide"

SEQ ID NO: 801 - DNA, 50 bp, Artificial Sequence; identical to SEQ ID NO: 799
  source: /note="Description of Artificial Sequence: Synthetic oligonucleotide"

SEQ ID NO: 802 - DNA, 50 bp, Artificial Sequence
  source: /note="Description of Artificial Sequence: Synthetic oligonucleotide"
agggggcctggtgggtagcgtgcagcccagcgttggcgccggtgcatcag

SEQ ID NO: 803 - DNA, 50 bp, Artificial Sequence
  source: /note="Description of Artificial Sequence: Synthetic oligonucleotide"
agggggcctggtgggtagcgtgcagcccagcgttggygcyrgtgcatcag

SEQ ID NO: 804 - DNA, 50 bp, Artificial Sequence
  source: /note="Description of Artificial Sequence: Synthetic oligonucleotide"
cactggtgcccctggccgtgatagtggccatcttcctgctcctggtggac

SEQ ID NO: 805 - DNA, 50 bp, Artificial Sequence
  source: /note="Description of Artificial Sequence: Synthetic oligonucleotide"
catttggtagtgaggcaggtatggggctagaagcactggtgcccctggcc

SEQ ID NO: 806 - DNA, 50 bp, Artificial Sequence; identical to SEQ ID NO: 805
  source: /note="Description of Artificial Sequence: Synthetic oligonucleotide"

SEQ ID NO: 807 - DNA, 50 bp, Artificial Sequence
  source: /note="Description of Artificial Sequence: Synthetic oligonucleotide"
tccagaggagcccatttggtagtgaggcaggtatggggctagaagcactg

SEQ ID NO: 808 - DNA, 50 bp, Artificial Sequence
  source: /note="Description of Artificial Sequence: Synthetic oligonucleotide"
ccagaggagcccatttggtagtgaggcaggtatggggctagaagcactga

SEQ ID NO: 809 - DNA, 50 bp, Artificial Sequence; identical to SEQ ID NO: 807
  source: /note="Description of Artificial Sequence: Synthetic oligonucleotide"

SEQ ID NO: 810 - DNA, 50 bp, Artificial Sequence
  source: /note="Description of Artificial Sequence: Synthetic oligonucleotide"
gtgtgtccagaggagcccatttggtagtgaggcaggtatggggctagaag

SEQ ID NO: 811 - DNA, 50 bp, Artificial Sequence
  source: /note="Description of Artificial Sequence: Synthetic oligonucleotide"
actggacagccccggcccagccaccatggtgtctttgctttcctggtgac

SEQ ID NO: 812 - DNA, 50 bp, Artificial Sequence; identical to SEQ ID NO: 811
  source: /note="Description of Artificial Sequence: Synthetic oligonucleotide"

SEQ ID NO: 813 - DNA, 50 bp, Artificial Sequence; identical to SEQ ID NO: 811
  source: /note="Description of Artificial Sequence: Synthetic oligonucleotide"

SEQ ID NO: 814 - DNA, 50 bp, Artificial Sequence
  source: /note="Description of Artificial Sequence: Synthetic oligonucleotide"
gcggggcacagcacaaagctcatagggggatggggtcaccaggaaagcaa

SEQ ID NO: 815 - DNA, 50 bp, Artificial Sequence
  source: /note="Description of Artificial Sequence: Synthetic oligonucleotide"
agcacaaagctcatagggggatggggtcaccaggaaagcaaagacaccat

SEQ ID NO: 816 - DNA, 50 bp, Artificial Sequence; identical to SEQ ID NO: 815
  source: /note="Description of Artificial Sequence: Synthetic oligonucleotide"

SEQ ID NO: 817 - DNA, 50 bp, Artificial Sequence; identical to SEQ ID NO: 588
  source: /note="Description of Artificial Sequence: Synthetic oligonucleotide"

SEQ ID NO: 818 - DNA, 50 bp, Artificial Sequence
  source: /note="Description of Artificial Sequence: Synthetic oligonucleotide"
cggtgctgaaggatgaggccgtctgggagaagcccttccgcttccacccc

SEQ ID NO: 819 - DNA, 50 bp, Artificial Sequence
  source: /note="Description of Artificial Sequence: Synthetic oligonucleotide"
caggaaggcctccggcttcacaaagtggccctgggcatccaggaagtgtt

SEQ ID NO: 820 - DNA, 50 bp, Artificial Sequence
  source: /note="Description of Artificial Sequence: Synthetic oligonucleotide"
catcttctgcccagggaacgacactcatcaccaacctgtcatcggtgctg

SEQ ID NO: 821 - DNA, 50 bp, Artificial Sequence
  source: /note="Description of Artificial Sequence: Synthetic oligonucleotide"
ctgggtgtgacccatatgacatcccgtgacatcgaagtacagggcttccg

SEQ ID NO: 822 - DNA, 50 bp, Artificial Sequence
  source: /note="Description of Artificial Sequence: Synthetic oligonucleotide"
cctgggtgtgacccatatgacatcccgtgacatcgaagtacagggcttcc

SEQ ID NO: 823 - DNA, 50 bp, Artificial Sequence
  source: /note="Description of Artificial Sequence: Synthetic oligonucleotide"
tgggtgaccaggctcacatgccctacaccactgccgtgattcatgaggtg

SEQ ID NO: 824 - DNA, 50 bp, Artificial Sequence; identical to SEQ ID NO: 823
  source: /note="Description of Artificial Sequence: Synthetic oligonucleotide"

SEQ ID NO: 825 - DNA, 50 bp, Artificial Sequence; identical to SEQ ID NO: 823
  source: /note="Description of Artificial Sequence: Synthetic oligonucleotide"

SEQ ID NO: 826 - DNA, 50 bp, Artificial Sequence
  source: /note="Description of Artificial Sequence: Synthetic oligonucleotide"
gggggacgatgtccccaaagcgctgcacctcatgaatcacggcagtggtg

SEQ ID NO: 827 - DNA, 50 bp, Artificial Sequence; identical to SEQ ID NO: 826
  source: /note="Description of Artificial Sequence: Synthetic oligonucleotide"

SEQ ID NO: 828 - DNA, 50 bp, Artificial Sequence
  source: /note="Description of Artificial Sequence: Synthetic oligonucleotide"
gaatcacggcagtggtgtagggcatgtgagcctggtcacccatctctggt

SEQ ID NO: 829 - DNA, 50 bp, Artificial Sequence
  source: /note="Description of Artificial Sequence: Synthetic oligonucleotide"
cattgtggggacgcatgtctgtccaggccgtgtccaacaggagatcgacg

SEQ ID NO: 830 - DNA, 50 bp, Artificial Sequence
  source: /note="Description of Artificial Sequence: Synthetic oligonucleotide"
gtgctgacccattgtggggacgcatgtctgtccaggccgtgtccaacagg

SEQ ID NO: 831 - DNA, 50 bp, Artificial Sequence; identical to SEQ ID NO: 830
  source: /note="Description of Artificial Sequence: Synthetic oligonucleotide"

SEQ ID NO: 832 - DNA, 50 bp, Artificial Sequence; identical to SEQ ID NO: 830
  source: /note="Description of Artificial Sequence: Synthetic oligonucleotide"

SEQ ID NO: 833 - DNA, 50 bp, Artificial Sequence; identical to SEQ ID NO: 661
  source: /note="Description of Artificial Sequence: Synthetic oligonucleotide"

SEQ ID NO: 834 - DNA, 50 bp, Artificial Sequence; identical to SEQ ID NO: 661
  source: /note="Description of Artificial Sequence: Synthetic oligonucleotide"

SEQ ID NO: 835 - DNA, 50 bp, Artificial Sequence
  source: /note="Description of Artificial Sequence: Synthetic oligonucleotide"
tgtcccgagtatgctctcggccctgctcaggccaaggggaaccctgagag

SEQ ID NO: 836 - DNA, 50 bp, Artificial Sequence
  source: /note="Description of Artificial Sequence: Synthetic oligonucleotide"
gacccagcccagcccccccgagacctgactgaggccttcctggcagagaa

SEQ ID NO: 837 - DNA, 50 bp, Artificial Sequence
  source: /note="Description of Artificial Sequence: Synthetic oligonucleotide"
cccaccacccttgccccccaccgtggcagccactctcaccttctccatct

SEQ ID NO: 838 - DNA, 50 bp, Artificial Sequence; identical to SEQ ID NO: 837
  source: /note="Description of Artificial Sequence: Synthetic oligonucleotide"

SEQ ID NO: 839 - DNA, 50 bp, Artificial Sequence; identical to SEQ ID NO: 675
  source: /note="Description of Artificial Sequence: Synthetic oligonucleotide"

SEQ ID NO: 840 - DNA, 50 bp, Artificial Sequence; identical to SEQ ID NO: 683
  source: /note="Description of Artificial Sequence: Synthetic oligonucleotide"

SEQ ID NO: 841 - DNA, 50 bp, Artificial Sequence; identical to SEQ ID NO: 683
  source: /note="Description of Artificial Sequence: Synthetic oligonucleotide"

SEQ ID NO: 842 - DNA, 50 bp, Artificial Sequence
  source: /note="Description of Artificial Sequence: Synthetic oligonucleotide"
tcctcggtctctcgctccgcacctcgcgcagaaagcccgactcctccttc

SEQ ID NO: 843 - DNA, 50 bp, Artificial Sequence
  source: /note="Description of Artificial Sequence: Synthetic oligonucleotide"
cacgttgctcacggctttgtccaagagaccgttggggcgaaaggggcgtc

SEQ ID NO: 844 - DNA, 50 bp, Artificial Sequence; identical to SEQ ID NO: 732
  source: /note="Description of Artificial Sequence: Synthetic oligonucleotide"

SEQ ID NO: 845 - DNA, 50 bp, Artificial Sequence; identical to SEQ ID NO: 732
  source: /note="Description of Artificial Sequence: Synthetic oligonucleotide"

SEQ ID NO: 846 - DNA, 50 bp, Artificial Sequence; identical to SEQ ID NO: 733
  source: /note="Description of Artificial Sequence: Synthetic oligonucleotide"

SEQ ID NO: 847 - DNA, 50 bp, Artificial Sequence; identical to SEQ ID NO: 737
  source: /note="Description of Artificial Sequence: Synthetic oligonucleotide"

SEQ ID NO: 848 - DNA, 50 bp, Artificial Sequence; identical to SEQ ID NO: 737
  source: /note="Description of Artificial Sequence: Synthetic oligonucleotide"

SEQ ID NO: 849 - DNA, 50 bp, Artificial Sequence
  source: /note="Description of Artificial Sequence: Synthetic oligonucleotide"
ggtggagacggagaagcgcctctgctcgcgccacgcgggcccatagcgcg

SEQ ID NO: 850 - DNA, 50 bp, Artificial Sequence; identical to SEQ ID NO: 849
  source: /note="Description of Artificial Sequence: Synthetic oligonucleotide"

SEQ ID NO: 851 - DNA, 50 bp, Artificial Sequence; identical to SEQ ID NO: 754
  source: /note="Description of Artificial Sequence: Synthetic oligonucleotide"

SEQ ID NO: 852 - DNA, 50 bp, Artificial Sequence
  source: /note="Description of Artificial Sequence: Synthetic oligonucleotide"
ctaatgccttcatggccacgcgcacgtgcccgtcccacccccaggggtgt

SEQ ID NO: 853 - DNA, 50 bp, Artificial Sequence; identical to SEQ ID NO: 764
  source: /note="Description of Artificial Sequence: Synthetic oligonucleotide"

SEQ ID NO: 854 - DNA, 50 bp, Artificial Sequence
  source: /note="Description of Artificial Sequence: Synthetic oligonucleotide"
ctgcttgccttgggaacgcggcccgaaacccaggatctgggtgatgggca

SEQ ID NO: 855 - DNA, 50 bp, Artificial Sequence; identical to SEQ ID NO: 854
  source: /note="Description of Artificial Sequence: Synthetic oligonucleotide"

SEQ ID NO: 856 - DNA, 50 bp, Artificial Sequence; identical to SEQ ID NO: 854
  source: /note="Description of Artificial Sequence: Synthetic oligonucleotide"

SEQ ID NO: 857 - DNA, 50 bp, Artificial Sequence; identical to SEQ ID NO: 772
  source: /note="Description of Artificial Sequence: Synthetic oligonucleotide"

SEQ ID NO: 858 - DNA, 50 bp, Artificial Sequence; identical to SEQ ID NO: 780
  source: /note="Description of Artificial Sequence: Synthetic oligonucleotide"

SEQ ID NO: 859 - DNA, 50 bp, Artificial Sequence; identical to SEQ ID NO: 780
  source: /note="Description of Artificial Sequence: Synthetic oligonucleotide"

SEQ ID NO: 860 - DNA, 50 bp, Artificial Sequence
  source: /note="Description of Artificial Sequence: Synthetic oligonucleotide"
agtctggggggatcctggcttgacaagaggccctgaccctccctctgcag

SEQ ID NO: 861 - DNA, 50 bp, Artificial Sequence
  source: /note="Description of Artificial Sequence: Synthetic oligonucleotide"
cctcacctggtcgaagcagtatggtgtgttctggaagtccacatgcagca

SEQ ID NO: 862 - DNA, 50 bp, Artificial Sequence; identical to SEQ ID NO: 861
  source: /note="Description of Artificial Sequence: Synthetic oligonucleotide"

SEQ ID NO: 863 - DNA, 50 bp, Artificial Sequence; identical to SEQ ID NO: 861
  source: /note="Description of Artificial Sequence: Synthetic oligonucleotide"

SEQ ID NO: 864 - DNA, 50 bp, Artificial Sequence
  source: /note="Description of Artificial Sequence: Synthetic oligonucleotide"
gaagcagtatggtgtgttctggaagtccacatgcagcaggttgcccagcc

SEQ ID NO: 865 - DNA, 50 bp, Artificial Sequence; identical to SEQ ID NO: 794
  source: /note="Description of Artificial Sequence: Synthetic oligonucleotide"

SEQ ID NO: 866 - DNA, 50 bp, Artificial Sequence
  source: /note="Description of Artificial Sequence: Synthetic oligonucleotide"
ggccgtgatagtggccatcttcctgctcctggtggacctgatgcaccggc

SEQ ID NO: 867 - DNA, 50 bp, Artificial Sequence; identical to SEQ ID NO: 866
  source: /note="Description of Artificial Sequence: Synthetic oligonucleotide"

SEQ ID NO: 868 - DNA, 50 bp, Artificial Sequence; identical to SEQ ID NO: 805
  source: /note="Description of Artificial Sequence: Synthetic oligonucleotide"

SEQ ID NO: 869 - DNA, 50 bp, Artificial Sequence; identical to SEQ ID NO: 810
  source: /note="Description of Artificial Sequence: Synthetic oligonucleotide"

SEQ ID NO: 870 - DNA, 50 bp, Artificial Sequence; identical to SEQ ID NO: 810
  source: /note="Description of Artificial Sequence: Synthetic oligonucleotide"

SEQ ID NO: 871 - DNA, 50 bp, Artificial Sequence
  source: /note="Description of Artificial Sequence: Synthetic oligonucleotide"
tcagtgtgattttattttatctatgtctcatttacttttctgtaagtaga

SEQ ID NO: 872 - DNA, 50 bp, Artificial Sequence
  source: /note="Description of Artificial Sequence: Synthetic oligonucleotide"
tgaagaacgacataaaagttggggaattgactgtctttttgaaaagttat

SEQ ID NO: 873 - DNA, 50 bp, Artificial Sequence
  source: /note="Description of Artificial Sequence: Synthetic oligonucleotide"
gaagaacgacataaaagttggggaattgactgtctttttgaaaagttata

SEQ ID NO: 874 - DNA, 50 bp, Artificial Sequence
  source: /note="Description of Artificial Sequence: Synthetic oligonucleotide"
cctgatgtcattcttcatagtattttaacatgttactctttcttgtttca

SEQ ID NO: 875 - DNA, 50 bp, Artificial Sequence; identical to SEQ ID NO: 874
  source: /note="Description of Artificial Sequence: Synthetic oligonucleotide"

SEQ ID NO: 876 - DNA, 50 bp, Artificial Sequence; identical to SEQ ID NO: 874
  source: /note="Description of Artificial Sequence: Synthetic oligonucleotide"

SEQ ID NO: 877 - DNA, 50 bp, Artificial Sequence
  source: /note="Description of Artificial Sequence: Synthetic oligonucleotide"
ctgtgtagagaaatgtaacaaataccttcttgtgttctttgtagctatgc

SEQ ID NO: 878 - DNA, 50 bp, Artificial Sequence; identical to SEQ ID NO: 877
  source: /note="Description of Artificial Sequence: Synthetic oligonucleotide"

SEQ ID NO: 879 - DNA, 50 bp, Artificial Sequence
  source: /note="Description of Artificial Sequence: Synthetic oligonucleotide"
ctgtgtagagaaatgtaacaaataccttcttgtgttctttgtagctatgg

SEQ ID NO: 880 - DNA, 50 bp, Artificial Sequence
  source: /note="Description of Artificial Sequence: Synthetic oligonucleotide"
ggagatactgaaacttctttcccaggagggaaaacattgtatctgcatag

SEQ ID NO: 881 - DNA, 50 bp, Artificial Sequence; identical to SEQ ID NO: 880
  source: /note="Description of Artificial Sequence: Synthetic oligonucleotide"

SEQ ID NO: 882 - DNA, 50 bp, Artificial Sequence
  source: /note="Description of Artificial Sequence: Synthetic oligonucleotide"
cctttgcctgtgtagagaaatgtaacaaataccttcttgtgttctttgta

SEQ ID NO: 883 - DNA, 50 bp, Artificial Sequence
  source: /note="Description of Artificial Sequence: Synthetic oligonucleotide"
tttctggtaggacaaatattggcaaatttgacatgatttgggatagagga

SEQ ID NO: 884 - DNA, 50 bp, Artificial Sequence; identical to SEQ ID NO: 883
  source: /note="Description of Artificial Sequence: Synthetic oligonucleotide"

SEQ ID NO: 885 - DNA, 50 bp, Artificial Sequence; identical to SEQ ID NO: 883
  source: /note="Description of Artificial Sequence: Synthetic oligonucleotide"

SEQ ID NO: 886 - DNA, 50 bp, Artificial Sequence
  source: /note="Description of Artificial Sequence: Synthetic oligonucleotide"
aagtgcagatgtagtattcaacctacctgggaagatcaaaaatactgcaa

SEQ ID NO: 887 - DNA, 50 bp, Artificial Sequence; identical to SEQ ID NO: 886
  source: /note="Description of Artificial Sequence: Synthetic oligonucleotide"

SEQ ID NO: 888 - DNA, 50 bp, Artificial Sequence; identical to SEQ ID NO: 886
  source: /note="Description of Artificial Sequence: Synthetic oligonucleotide"

SEQ ID NO: 889 - DNA, 50 bp, Artificial Sequence
  source: /note="Description of Artificial Sequence: Synthetic oligonucleotide"
atcccaagttcactgatttccacaccaactacactgtgtccccggtctgg

SEQ ID NO: 890 - DNA, 50 bp, Artificial Sequence
  source: /note="Description of Artificial Sequence: Synthetic oligonucleotide"
tcatttgaaaacataatttaagtgtaaatgtatgattttatgcaggtttc

SEQ ID NO: 891 - DNA, 50 bp, Artificial Sequence; identical to SEQ ID NO: 889
  source: /note="Description of Artificial Sequence: Synthetic oligonucleotide"

SEQ ID NO: 892 - DNA, 50 bp, Artificial Sequence
  source: /note="Description of Artificial Sequence: Synthetic oligonucleotide"
cgtaggcacggaagacatatgcttgtgagacaaaggtgtctctgaaacta

SEQ ID NO: 893 - DNA, 50 bp, Artificial Sequence; identical to SEQ ID NO: 892
  source: /note="Description of Artificial Sequence: Synthetic oligonucleotide"

SEQ ID NO: 894 - DNA, 50 bp, Artificial Sequence; identical to SEQ ID NO: 892
  source: /note="Description of Artificial Sequence: Synthetic oligonucleotide"

SEQ ID NO: 895 - DNA, 50 bp, Artificial Sequence
  source: /note="Description of Artificial Sequence: Synthetic oligonucleotide"
acgtaggcacggaagacatatgcttgtgagacaaaggtgtctctgaaact

SEQ ID NO: 896 - DNA, 50 bp, Artificial Sequence; identical to SEQ ID NO: 895
  source: /note="Description of Artificial Sequence: Synthetic oligonucleotide"

SEQ ID NO: 897 - DNA, 50 bp, Artificial Sequence; identical to SEQ ID NO: 895
  source: /note="Description of Artificial Sequence: Synthetic oligonucleotide"

SEQ ID NO: 898 - DNA, 50 bp, Artificial Sequence
  source: /note="Description of Artificial Sequence: Synthetic oligonucleotide"
cagggtctagtagatcacatgattcatcagaggacttgaaatacatgctg

SEQ ID NO: 899 - DNA, 50 bp, Artificial Sequence; identical to SEQ ID NO: 898
  source: /note="Description of Artificial Sequence: Synthetic oligonucleotide"

SEQ ID NO: 900 - DNA, 50 bp, Artificial Sequence
  source: /note="Description of Artificial Sequence: Synthetic oligonucleotide"
cagagaaagacaatatagttcttggagaaggtggaatcacactgagtgga

SEQ ID NO: 901 - DNA, 50 bp, Artificial Sequence
  source: /note="Description of Artificial Sequence: Synthetic oligonucleotide"
tcactcatcttgttacaagcttaaaaggactatggacacttcgtgccttc

SEQ ID NO: 902 - DNA, 50 bp, Artificial Sequence
  source: /note="Description of Artificial Sequence: Synthetic oligonucleotide"
cacttttaccttataggtgggcctcttgggaagaactggatcagggaaga

SEQ ID NO: 903 - DNA, 50 bp, Artificial Sequence
  source: /note="Description of Artificial Sequence: Synthetic oligonucleotide"
tataggtgggcctcttgggaagaactggatcagggaagagtactttgtta

SEQ ID NO: 904 - DNA, 50 bp, Artificial Sequence
  source: /note="Description of Artificial Sequence: Synthetic oligonucleotide"
tcttcgccttactgagaacagatctagccaagcacatcaactgcttgtgg

SEQ ID NO: 905 - DNA, 50 bp, Artificial Sequence
  source: /note="Description of Artificial Sequence: Synthetic oligonucleotide"
gaaaaaaagtttggagacaacgctggccttttccagaggcgacctctgca

SEQ ID NO: 906 - DNA, 50 bp, Artificial Sequence
  source: /note="Description of Artificial Sequence: Synthetic oligonucleotide"
ggagcttgagcccagacggccctagcagggaccccagcgcccgagagacc

SEQ ID NO: 907 - DNA, 50 bp, Artificial Sequence; identical to SEQ ID NO: 905
  source: /note="Description of Artificial Sequence: Synthetic oligonucleotide"

SEQ ID NO: 908 - DNA, 50 bp, Artificial Sequence
  source: /note="Description of Artificial Sequence: Synthetic oligonucleotide"
taaacaatgtacatgaacatacctttccaatttttcagatagattgtcaa

SEQ ID NO: 909 - DNA, 50 bp, Artificial Sequence; identical to SEQ ID NO: 908
  source: /note="Description of Artificial Sequence: Synthetic oligonucleotide"

SEQ ID NO: 910 - DNA, 50 bp, Artificial Sequence; identical to SEQ ID NO: 908
  source: /note="Description of Artificial Sequence: Synthetic oligonucleotide"

SEQ ID NO: 911 - DNA, 50 bp, Artificial Sequence
  source: /note="Description of Artificial Sequence: Synthetic oligonucleotide"
ggcattaatgagtttaggatttttctttgaagccagctctctatcccatt

SEQ ID NO: 912 - DNA, 50 bp, Artificial Sequence; identical to SEQ ID NO: 911
  source: /note="Description of Artificial Sequence: Synthetic oligonucleotide"

SEQ ID NO: 913 - DNA, 50 bp, Artificial Sequence; identical to SEQ ID NO: 911
  source: /note="Description of Artificial Sequence: Synthetic oligonucleotide"

SEQ ID NO: 914 - DNA, 50 bp, Artificial Sequence
  source: /note="Description of Artificial Sequence: Synthetic oligonucleotide"
tttattcttttgcagagaatgggatagagagctggcttcaaagaaaaatc

SEQ ID NO: 915 - DNA, 50 bp, Artificial Sequence; identical to SEQ ID NO: 914
  source: /note="Description of Artificial Sequence: Synthetic oligonucleotide"

SEQ ID NO: 916 - DNA, 50 bp, Artificial Sequence; identical to SEQ ID NO: 914
  source: /note="Description of Artificial Sequence: Synthetic oligonucleotide"

SEQ ID NO: 917 - DNA, 50 bp, Artificial Sequence
  source: /note="Description of Artificial Sequence: Synthetic oligonucleotide"
gggatagagagctggcttcaaagaaaaatcytaaactcattaatgccctt

SEQ ID NO: 918 - DNA, 50 bp, Artificial Sequence; identical to SEQ ID NO: 917
  source: /note="Description of Artificial Sequence: Synthetic oligonucleotide"

SEQ ID NO: 919 - DNA, 50 bp, Artificial Sequence
  source: /note="Description of Artificial Sequence: Synthetic oligonucleotide"
gggatagagagctggcttcaaagaaaaatcctaaactcattaatgccctt

SEQ ID NO: 920 - DNA, 50 bp, Artificial Sequence
  source: /note="Description of Artificial Sequence: Synthetic oligonucleotide"
acataatgaatgtacaaatgagatccttacccctaaatataaaaagattt

SEQ ID NO: 921 - DNA, 50 bp, Artificial Sequence; identical to SEQ ID NO: 920
  source: /note="Description of Artificial Sequence: Synthetic oligonucleotide"

SEQ ID NO: 922 - DNA, 50 bp, Artificial Sequence; identical to SEQ ID NO: 920
  source: /note="Description of Artificial Sequence: Synthetic oligonucleotide"

SEQ ID NO: 923 - DNA, 50 bp, Artificial Sequence
  source: /note="Description of Artificial Sequence: Synthetic oligonucleotide"
gaagctatgattcttcccagtaagagaggctgtactgctttggtgactta

SEQ ID NO: 924 - DNA, 50 bp, Artificial Sequence; identical to SEQ ID NO: 923
  source: /note="Description of Artificial Sequence: Synthetic oligonucleotide"

SEQ ID NO: 925 - DNA, 50 bp, Artificial Sequence; identical to SEQ ID NO: 923
  source: /note="Description of Artificial Sequence: Synthetic oligonucleotide"

SEQ ID NO: 926 - DNA, 50 bp, Artificial Sequence
  source: /note="Description of Artificial Sequence: Synthetic oligonucleotide"
caccaaagcagtacagcctctcttactgggaagaatcatagcttcctatc

SEQ ID NO: 927 - DNA, 50 bp, Artificial Sequence; identical to SEQ ID NO: 926
  source: /note="Description of Artificial Sequence: Synthetic oligonucleotide"

SEQ ID NO: 928 - DNA, 50 bp, Artificial Sequence; identical to SEQ ID NO: 926
  source: /note="Description of Artificial Sequence: Synthetic oligonucleotide"

SEQ ID NO: 929 - DNA, 50 bp, Artificial Sequence
  source: /note="Description of Artificial Sequence: Synthetic oligonucleotide"
accaaagcagtacagcctctcttactgggaagaatcatagcttcctatga

SEQ ID NO: 930 - DNA, 50 bp, Artificial Sequence; identical to SEQ ID NO: 929
  source: /note="Description of Artificial Sequence: Synthetic oligonucleotide"

SEQ ID NO: 931 - DNA, 50 bp, Artificial Sequence; identical to SEQ ID NO: 929
  source: /note="Description of Artificial Sequence: Synthetic oligonucleotide"

SEQ ID NO: 932 - DNA, 50 bp, Artificial Sequence
  source: /note="Description of Artificial Sequence: Synthetic oligonucleotide"
cacaataaagagaaggcataagcctatgcctagataaatcgcgatagagc

SEQ ID NO: 933 - DNA, 50 bp, Artificial Sequence
  source: /note="Description of Artificial Sequence: Synthetic oligonucleotide"
cttactgggaagaatcatagcttcctatgacccggataacaaggaggaat

SEQ ID NO: 934 - DNA, 50 bp, Artificial Sequence
  source: /note="Description of Artificial Sequence: Synthetic oligonucleotide"
tcttactgggaagaatcatagcttcctatgacccggataacaaggaggaa

SEQ ID NO: 935 - DNA, 50 bp, Artificial Sequence
  source: /note="Description of Artificial Sequence: Synthetic oligonucleotide"
ttactgggaagaatcatagcttcctatgacccggataacaaggaggaaca

SEQ ID NO: 936 - DNA, 50 bp, Artificial Sequence; identical to SEQ ID NO: 935
  source: /note="Description of Artificial Sequence: Synthetic oligonucleotide"

SEQ ID NO: 937 - DNA, 50 bp, Artificial Sequence
  source: /note="Description of Artificial Sequence: Synthetic oligonucleotide"
tcacaataaagagaaggcataagcctatgcctagataaatcgcgatagag

SEQ ID NO: 938 - DNA, 50 bp, Artificial Sequence
  source: /note="Description of Artificial Sequence: Synthetic oligonucleotide"
tacttcatcaaatttgttcaggttgttggaaaggagactaacaagttgtc

SEQ ID NO: 939 - DNA, 50 bp, Artificial Sequence; identical to SEQ ID NO: 938
  source: /note="Description of Artificial Sequence: Synthetic oligonucleotide"

SEQ ID NO: 940 - DNA, 50 bp, Artificial Sequence
  source: /note="Description of Artificial Sequence: Synthetic oligonucleotide"
gtattggacaacttgttagtctcctttccaacaacctgaacaaatttgat

SEQ ID NO: 941 - DNA, 50 bp, Artificial Sequence
  source: /note="Description of Artificial Sequence: Synthetic oligonucleotide"
tattggacaacttgttagtctcctttccaacaacctgaacaaatttgata

SEQ ID NO: 942 - DNA, 50 bp, Artificial Sequence; identical to SEQ ID NO: 940
  source: /note="Description of Artificial Sequence: Synthetic oligonucleotide"

SEQ ID NO: 943 - DNA, 50 bp, Artificial Sequence
  source: /note="Description of Artificial Sequence: Synthetic oligonucleotide"
ttggacaacttgttagtctcctttccaacaacctgaacaaatttgatgaa

SEQ ID NO: 944 - DNA, 50 bp, Artificial Sequence; identical to SEQ ID NO: 943
  source: /note="Description of Artificial Sequence: Synthetic oligonucleotide"

SEQ ID NO: 945 - DNA, 50 bp, Artificial Sequence; identical to SEQ ID NO: 943
  source: /note="Description of Artificial Sequence: Synthetic oligonucleotide"

SEQ ID NO: 946 - DNA, 50 bp, Artificial Sequence
  source: /note="Description of Artificial Sequence: Synthetic oligonucleotide"
ttttattttccagggacttgcattggcacatttcgtgtggatcgctcctt

SEQ ID NO: 947 - DNA, 50 bp, Artificial Sequence; identical to SEQ ID NO: 946
  source: /note="Description of Artificial Sequence: Synthetic oligonucleotide"

SEQ ID NO: 948 - DNA, 50 bp, Artificial Sequence; identical to SEQ ID NO: 946
  source: /note="Description of Artificial Sequence: Synthetic oligonucleotide"

SEQ ID NO: 949 - DNA, 50 bp, Artificial Sequence
  source: /note="Description of Artificial Sequence: Synthetic oligonucleotide"
tggtgtttttatctgtgcttccctatgcactaatcaaaggaatcatcctc

SEQ ID NO: 950 - DNA, 50 bp, Artificial Sequence; identical to SEQ ID NO: 949
  source: /note="Description of Artificial Sequence: Synthetic oligonucleotide"

SEQ ID NO: 951 - DNA, 50 bp, Artificial Sequence; identical to SEQ ID NO: 949
  source: /note="Description of Artificial Sequence: Synthetic oligonucleotide"

SEQ ID NO: 952 - DNA, 50 bp, Artificial Sequence
  source: /note="Description of Artificial Sequence: Synthetic oligonucleotide"
ttatctgtgcttccctatgcactaatcaaaggaatcatcctcyggaaaat

SEQ ID NO: 953 - DNA, 50 bp, Artificial Sequence; identical to SEQ ID NO: 952
  source: /note="Description of Artificial Sequence: Synthetic oligonucleotide"

SEQ ID NO: 954 - DNA, 50 bp, Artificial Sequence
  source: /note="Description of Artificial Sequence: Synthetic oligonucleotide"
ttatctgtgcttccctatgcactaatcaaaggaatcatcctccggaaaat

SEQ ID NO: 955 - DNA, 50 bp, Artificial Sequence
  source: /note="Description of Artificial Sequence: Synthetic oligonucleotide"
tgtgcttccctatgcactaatcaaaggaatcatcctccggaaaatattca

SEQ ID NO: 956 - DNA, 50 bp, Artificial Sequence
  source: /note="Description of Artificial Sequence: Synthetic oligonucleotide"
gaaattgccgagtgaccgccatgcgcagaacaatgcagaatgrgatggtg

SEQ ID NO: 957 - DNA, 50 bp, Artificial Sequence; identical to SEQ ID NO: 955
  source: /note="Description of Artificial Sequence: Synthetic oligonucleotide"

SEQ ID NO: 958 - DNA, 50 bp, Artificial Sequence
  source: /note="Description of Artificial Sequence: Synthetic oligonucleotide"
ctatgcactaatcaaaggaatcatcctcyggaaaahattcaycaccatct

SEQ ID NO: 959 - DNA, 50 bp, Artificial Sequence
  source: /note="Description of Artificial Sequence: Synthetic oligonucleotide"
agcccagggaaattgccgagtgaccgccatgygcagaacaatgcagaatg

SEQ ID NO: 960 - DNA, 50 bp, Artificial Sequence
  source: /note="Description of Artificial Sequence: Synthetic oligonucleotide"
gcccagggaaattgccgagtgaccgccatgygcagaacaatgcagaatga

SEQ ID NO: 961 - DNA, 50 bp, Artificial Sequence
  source: /note="Description of Artificial Sequence: Synthetic oligonucleotide"
gtcataccatgtttgtacagcccagggaaattgccgagtgaccgccatgc

SEQ ID NO: 962 - DNA, 50 bp, Artificial Sequence
  source: /note="Description of Artificial Sequence: Synthetic oligonucleotide"
gtcataccatgtttgtacagcccagggaaattgcygagtgaccgccatgt

SEQ ID NO: 963 - DNA, 50 bp, Artificial Sequence; identical to SEQ ID NO: 962
  source: /note="Description of Artificial Sequence: Synthetic oligonucleotide"

SEQ ID NO: 964 - DNA, 50 bp, Artificial Sequence
  source: /note="Description of Artificial Sequence: Synthetic oligonucleotide"
ttattgctccaagagagtcataccatgtttgtacagcccagggaaattgc

SEQ ID NO: 965 - DNA, 50 bp, Artificial Sequence; identical to SEQ ID NO: 964
  source: /note="Description of Artificial Sequence: Synthetic oligonucleotide"

SEQ ID NO: 966 - DNA, 50 bp, Artificial Sequence; identical to SEQ ID NO: 964
  source: /note="Description of Artificial Sequence: Synthetic oligonucleotide"

SEQ ID NO: 967 - DNA, 50 bp, Artificial Sequence
  source: /note="Description of Artificial Sequence: Synthetic oligonucleotide"
agtgaagaacaaaagaactaccttgcctgctccagtggatccagcaacct

SEQ ID NO: 968 - DNA, 50 bp, Artificial Sequence; identical to SEQ ID NO: 967
  source: /note="Description of Artificial Sequence: Synthetic oligonucleotide"

SEQ ID NO: 969 - DNA, 50 bp, Artificial Sequence; identical to SEQ ID NO: 967
  source: /note="Description of Artificial Sequence: Synthetic oligonucleotide"

SEQ ID NO: 970 - DNA, 50 bp, Artificial Sequence
  source: /note="Description of Artificial Sequence: Synthetic oligonucleotide"
cgtgatttgataatgacctaataatgatgggttttatttccagacttcac

SEQ ID NO: 971 - DNA, 50 bp, Artificial Sequence
  source: /note="Description of Artificial Sequence: Synthetic oligonucleotide"
gcttaattttaccctctgaaggctccagttctcccataatcaccattaga

SEQ ID NO: 972 - DNA, 50 bp, Artificial Sequence; identical to SEQ ID NO: 971
  source: /note="Description of Artificial Sequence: Synthetic oligonucleotide"

SEQ ID NO: 973 - DNA, 50 bp, Artificial Sequence
  source: /note="Description of Artificial Sequence: Synthetic oligonucleotide"
ggagccttcagagggtaaaattaagcacagtggaagaatttcattctgtt

SEQ ID NO: 974 - DNA, 50 bp, Artificial Sequence; identical to SEQ ID NO: 973
  source: /note="Description of Artificial Sequence: Synthetic oligonucleotide"

SEQ ID NO: 975 - DNA, 50 bp, Artificial Sequence; identical to SEQ ID NO: 973
  source: /note="Description of Artificial Sequence: Synthetic oligonucleotide"

SEQ ID NO: 976 - DNA, 50 bp, Artificial Sequence
  source: /note="Description of Artificial Sequence: Synthetic oligonucleotide"
tgttctcagttttcctggattatgcctggcaccattaaagaaaatatcat

SEQ ID NO: 977 - DNA, 50 bp, Artificial Sequence; identical to SEQ ID NO: 976
  source: /note="Description of Artificial Sequence: Synthetic oligonucleotide"

SEQ ID NO: 978 - DNA, 50 bp, Artificial Sequence; identical to SEQ ID NO: 976
  source: /note="Description of Artificial Sequence: Synthetic oligonucleotide"

SEQ ID NO: 979 - DNA, 50 bp, Artificial Sequence
  source: /note="Description of Artificial Sequence: Synthetic oligonucleotide"
agaaaatatcatctttggtgtttcctatgatgaatatagatacagaagca

SEQ ID NO: 980 - DNA, 50 bp, Artificial Sequence; identical to SEQ ID NO: 979
  source: /note="Description of Artificial Sequence: Synthetic oligonucleotide"

SEQ ID NO: 981 - DNA, 50 bp, Artificial Sequence; identical to SEQ ID NO: 979
  source: /note="Description of Artificial Sequence: Synthetic oligonucleotide"

SEQ ID NO: 982 - DNA, 50 bp, Artificial Sequence
  source: /note="Description of Artificial Sequence: Synthetic oligonucleotide"
tttggtaataggacatctccaagtttgcagagaaagacaatatagttctt

SEQ ID NO: 983 - DNA, 50 bp, Artificial Sequence
  source: /note="Description of Artificial Sequence: Synthetic oligonucleotide"
ttggtaataggacatctccaagtttgcagagaaagacaatatagttcttt

SEQ ID NO: 984 - DNA, 50 bp, Artificial Sequence
  source: /note="Description of Artificial Sequence: Synthetic oligonucleotide"
agtttgcagagaaagacaatatagttcttggagaaggtggaatcacactg

SEQ ID NO: 985 - DNA, 50 bp, Artificial Sequence; identical to SEQ ID NO: 984
  source: /note="Description of Artificial Sequence: Synthetic oligonucleotide"

SEQ ID NO: 986 - DNA, 50 bp, Artificial Sequence; identical to SEQ ID NO: 984
  source: /note="Description of Artificial Sequence: Synthetic oligonucleotide"

SEQ ID NO: 987 - DNA, 50 bp, Artificial Sequence
  source: /note="Description of Artificial Sequence: Synthetic oligonucleotide"
gtttgcagagaaagacaatatagttcttggagaaggtggaatcacactga

SEQ ID NO: 988 - DNA, 50 bp, Artificial Sequence
  source: /note="Description of Artificial Sequence: Synthetic oligonucleotide"
tttgcagagaaagacaatatagttcttggagaaggtggaatcacactgaa

SEQ ID NO: 989 - DNA, 50 bp, Artificial Sequence; identical to SEQ ID NO: 987
  source: /note="Description of Artificial Sequence: Synthetic oligonucleotide"

SEQ ID NO: 990 - DNA, 50 bp, Artificial Sequence
  source: /note="Description of Artificial Sequence: Synthetic oligonucleotide"
ttgcagagaaagacaatatagttcttggagaaggtggaatcacactgagt

SEQ ID NO: 991 - DNA, 50 bp, Artificial Sequence; identical to SEQ ID NO: 990
  source: /note="Description of Artificial Sequence: Synthetic oligonucleotide"

SEQ ID NO: 992 - DNA, 50 bp, Artificial Sequence; identical to SEQ ID NO: 990
  source: /note="Description of Artificial Sequence: Synthetic oligonucleotide"

SEQ ID NO: 993 - DNA, 50 bp, Artificial Sequence; identical to SEQ ID NO: 900
  source: /note="Description of Artificial Sequence: Synthetic oligonucleotide"

SEQ ID NO: 994 - DNA, 50 bp, Artificial Sequence
  source: /note="Description of Artificial Sequence: Synthetic oligonucleotide"
tagaccaataattagttattcaccttgctaaagaaattcttgctcgttga

SEQ ID NO: 995 - DNA, 50 bp, Artificial Sequence; identical to SEQ ID NO: 994
  source: /note="Description of Artificial Sequence: Synthetic oligonucleotide"

SEQ ID NO: 996 - DNA, 50 bp, Artificial Sequence; identical to SEQ ID NO: 994
  source: /note="Description of Artificial Sequence: Synthetic oligonucleotide"

SEQ ID NO: 997 - DNA, 50 bp, Artificial Sequence
  source: /note="Description of Artificial Sequence: Synthetic oligonucleotide"
agacaatatagttcttggagaaggtggaatcacactgagtggaggtcaat

SEQ ID NO: 998 - DNA, 50 bp, Artificial Sequence; identical to SEQ ID NO: 997
  source: /note="Description of Artificial Sequence: Synthetic oligonucleotide"

SEQ ID NO: 999 - DNA, 50 bp, Artificial Sequence
  source: /note="Description of Artificial Sequence: Synthetic oligonucleotide"
aagacaatatagttcttggagaaggtggaatcacactgagtggaggtcaa

SEQ ID NO: 1000 - DNA, 50 bp, Artificial Sequence
  source: /note="Description of Artificial Sequence: Synthetic oligonucleotide"
agaaggtggaatcacactgagtggaggtcaacgagcaagaatttctttaa

SEQ ID NO: 1001 - DNA, 50 bp, Artificial Sequence; identical to SEQ ID NO: 1000
  source: /note="Description of Artificial Sequence: Synthetic oligonucleotide"

SEQ ID NO: 1002 - DNA, 50 bp, Artificial Sequence
  source: /note="Description of Artificial Sequence: Synthetic oligonucleotide"
tgacatttacagcaaatgcttgctagaccaataattagttattcaccttg

SEQ ID NO: 1003 - DNA, 50 bp, Artificial Sequence
  source: /note="Description of Artificial Sequence: Synthetic oligonucleotide"
gaatgacatttacagcaaatgcttgctagaccaataattagttattcacg

SEQ ID NO: 1004 - DNA, 50 bp, Artificial Sequence
  source: /note="Description of Artificial Sequence: Synthetic oligonucleotide"
ggtggaatcacactgagtggaggtcaacgagcaagaatttctttagcaac

SEQ ID NO: 1005 - DNA, 50 bp, Artificial Sequence
  source: /note="Description of Artificial Sequence: Synthetic oligonucleotide"
ggtggaatcacactgagtggaggtcaacgagcaagaatttctttagcaaa

SEQ ID NO: 1006 - DNA, 50 bp, Artificial Sequence
  source: /note="Description of Artificial Sequence: Synthetic oligonucleotide"
tatccaaaaggagagtctaataaatacaaatcagcatctttgtatactkc

SEQ ID NO: 1007 - DNA, 50 bp, Artificial Sequence
  source: /note="Description of Artificial Sequence: Synthetic oligonucleotide"
tatccaaaaggagagtctaataaatacaaatcagcatctttgtatactgc

SEQ ID NO: 1008 - DNA, 50 bp, Artificial Sequence; identical to SEQ ID NO: 1007
  source: /note="Description of Artificial Sequence: Synthetic oligonucleotide"

SEQ ID NO: 1009 - DNA, 50 bp, Artificial Sequence
  source: /note="Description of Artificial Sequence: Synthetic oligonucleotide"
ggtatccaaaaggagagtctaataaatacaaatcagcatctttgtatact

SEQ ID NO: 1010 - DNA, 50 bp, Artificial Sequence; identical to SEQ ID NO: 1009
  source: /note="Description of Artificial Sequence: Synthetic oligonucleotide"

SEQ ID NO: 1011 - DNA, 50 bp, Artificial Sequence; identical to SEQ ID NO: 1009
  source: /note="Description of Artificial Sequence: Synthetic oligonucleotide"

SEQ ID NO: 1012 - DNA, 50 bp, Artificial Sequence
  source: /note="Description of Artificial Sequence: Synthetic oligonucleotide"
tctttttctgttaaaacatctaggtatccaaaaggagagtctaataaata

SEQ ID NO: 1013 - DNA, 50 bp, Artificial Sequence; identical to SEQ ID NO: 1012
  source: /note="Description of Artificial Sequence: Synthetic oligonucleotide"

SEQ ID NO: 1014 - DNA, 50 bp, Artificial Sequence
  source: /note="Description of Artificial Sequence: Synthetic oligonucleotide"
ttctttttctgttaaaacatctaggtatccaaaaggagagtctaataaat

SEQ ID NO: 1015 - DNA, 50 bp, Artificial Sequence
  source: /note="Description of Artificial Sequence: Synthetic oligonucleotide"
tacaaagatgctgatttgtatttattagactctccttttggatacctaga

SEQ ID NO: 1016 - DNA, 50 bp, Artificial Sequence; identical to SEQ ID NO: 1015
  source: /note="Description of Artificial Sequence: Synthetic oligonucleotide"

SEQ ID NO: 1017 - DNA, 50 bp, Artificial Sequence; identical to SEQ ID NO: 1015
  source: /note="Description of Artificial Sequence: Synthetic oligonucleotide"

SEQ ID NO: 1018 - DNA, 50 bp, Artificial Sequence
  source: /note="Description of Artificial Sequence: Synthetic oligonucleotide"
accaatttagtgcagaaagaagaaattcaatcctaactgagaccttacac

SEQ ID NO: 1019 - DNA, 50 bp, Artificial Sequence; identical to SEQ ID NO: 1018
  source: /note="Description of Artificial Sequence: Synthetic oligonucleotide"

SEQ ID NO: 1020 - DNA, 50 bp, Artificial Sequence; identical to SEQ ID NO: 1018
  source: /note="Description of Artificial Sequence: Synthetic oligonucleotide"

SEQ ID NO: 1021 - DNA, 50 bp, Artificial Sequence
  source: /note="Description of Artificial Sequence: Synthetic oligonucleotide"
gttccatgtagtcactgctggtatgctctccatatcatcaaaaaagcact

SEQ ID NO: 1022 - DNA, 50 bp, Artificial Sequence
  source: /note="Description of Artificial Sequence: Synthetic oligonucleotide"
gcatgaaactgtactgtcttattgtaatagccataattcttttattcagt

SEQ ID NO: 1023 - DNA, 50 bp, Artificial Sequence
  source: /note="Description of Artificial Sequence: Synthetic oligonucleotide"
ttccatgtagtcactgctggtatgctctccatatcatcaaaaaagcacta

SEQ ID NO: 1024 - DNA, 50 bp, Artificial Sequence
  source: /note="Description of Artificial Sequence: Synthetic oligonucleotide"
atttaatcaacagaaataaaacacaatctacacaataggacatggaatat

SEQ ID NO: 1025 - DNA, 50 bp, Artificial Sequence; identical to SEQ ID NO: 1024
  source: /note="Description of Artificial Sequence: Synthetic oligonucleotide"

SEQ ID NO: 1026 - DNA, 50 bp, Artificial Sequence
  source: /note="Description of Artificial Sequence: Synthetic oligonucleotide"
tatttaatcaacagaaataaaacacaatctacacaataggacatggaata

SEQ ID NO: 1027 - DNA, 50 bp, Artificial Sequence
  source: /note="Description of Artificial Sequence: Synthetic oligonucleotide"
tgtgattagagtatgcaccagtggtagacctctgaagaatcccatagcaa

SEQ ID NO: 1028 - DNA, 50 bp, Artificial Sequence; identical to SEQ ID NO: 1027
  source: /note="Description of Artificial Sequence: Synthetic oligonucleotide"

SEQ ID NO: 1029 - DNA, 50 bp, Artificial Sequence
  source: /note="Description of Artificial Sequence: Synthetic oligonucleotide"
cagttcgtattatgtgttttacatttacgtgggagtagccgacactttgc

SEQ ID NO: 1030 - DNA, 50 bp, Artificial Sequence
  source: /note="Description of Artificial Sequence: Synthetic oligonucleotide"
tatgggattcttcagaggtctaccactggtgcatactctaatcacagtgt

SEQ ID NO: 1031 - DNA, 50 bp, Artificial Sequence; identical to SEQ ID NO: 1030
  source: /note="Description of Artificial Sequence: Synthetic oligonucleotide"

SEQ ID NO: 1032 - DNA, 50 bp, Artificial Sequence; identical to SEQ ID NO: 1030
  source: /note="Description of Artificial Sequence: Synthetic oligonucleotide"

SEQ ID NO: 1033 - DNA, 50 bp, Artificial Sequence
  source: /note="Description of Artificial Sequence: Synthetic oligonucleotide"
cctattgatggtggatcagcagtttcatttcttagacctagtaaagtacg

SEQ ID NO: 1034 - DNA, 50 bp, Artificial Sequence; identical to SEQ ID NO: 1033
  source: /note="Description of Artificial Sequence: Synthetic oligonucleotide"

SEQ ID NO: 1035 - DNA, 50 bp, Artificial Sequence; identical to SEQ ID NO: 1033
  source: /note="Description of Artificial Sequence: Synthetic oligonucleotide"

SEQ ID NO: 1036 - DNA, 50 bp, Artificial Sequence
  source: /note="Description of Artificial Sequence: Synthetic oligonucleotide"
gtcaaatatggtaagaggcagaaggtcatccaaaattgctatatctttga

SEQ ID NO: 1037 - DNA, 50 bp, Artificial Sequence; identical to SEQ ID NO: 1036
  source: /note="Description of Artificial Sequence: Synthetic oligonucleotide"

SEQ ID NO: 1038 - DNA, 50 bp, Artificial Sequence; identical to SEQ ID NO: 1036
  source: /note="Description of Artificial Sequence: Synthetic oligonucleotide"

SEQ ID NO: 1039 - DNA, 50 bp, Artificial Sequence
  source: /note="Description of Artificial Sequence: Synthetic oligonucleotide"
agggttgtaaaactgcgacaactgctatagctccaatcacaattaataac

SEQ ID NO: 1040 - DNA, 50 bp, Artificial Sequence
  source: /note="Description of Artificial Sequence: Synthetic oligonucleotide"
agggttgtaaaactgcgacaactgctatagctccaatcacaattaataag

SEQ ID NO: 1041 - DNA, 50 bp, Artificial Sequence; identical to SEQ ID NO: 1039
  source: /note="Description of Artificial Sequence: Synthetic oligonucleotide"

SEQ ID NO: 1042 - DNA, 50 bp, Artificial Sequence
  source: /note="Description of Artificial Sequence: Synthetic oligonucleotide"
agatgagtgaaaattggactcctgcctgtgaaatatttccatagaaaaca

SEQ ID NO: 1043 - DNA, 50 bp, Artificial Sequence
  source: /note="Description of Artificial Sequence: Synthetic oligonucleotide"
ttcaggtacaagatattatgaaattacattttgtgtttatgttatttgca

SEQ ID NO: 1044 - DNA, 50 bp, Artificial Sequence; identical to SEQ ID NO: 1042
  source: /note="Description of Artificial Sequence: Synthetic oligonucleotide"

SEQ ID NO: 1045 - DNA, 50 bp, Artificial Sequence
  source: /note="Description of Artificial Sequence: Synthetic oligonucleotide"
aaggcacgaagtgtccatagtccttttaagcttgtaacaagatgagtgaa

SEQ ID NO: 1046 - DNA, 50 bp, Artificial Sequence; identical to SEQ ID NO: 1045
  source: /note="Description of Artificial Sequence: Synthetic oligonucleotide"

SEQ ID NO: 1047 - DNA, 50 bp, Artificial Sequence
  source: /note="Description of Artificial Sequence: Synthetic oligonucleotide"
gttatttgcaatgttttctatggaaatatttcacaggcaggagtccaatt

SEQ ID NO: 1048 - DNA, 50 bp, Artificial Sequence
  source: /note="Description of Artificial Sequence: Synthetic oligonucleotide"
cgtccgaaggcacgaagtgtccatagtccttttaagcttgtaacaagata

SEQ ID NO: 1049 - DNA, 50 bp, Artificial Sequence; identical to SEQ ID NO: 1048
  source: /note="Description of Artificial Sequence: Synthetic oligonucleotide"

SEQ ID NO: 1050 - DNA, 50 bp, Artificial Sequence; identical to SEQ ID NO: 1048
  source: /note="Description of Artificial Sequence: Synthetic oligonucleotide"

SEQ ID NO: 1051 - DNA, 50 bp, Artificial Sequence
  source: /note="Description of Artificial Sequence: Synthetic oligonucleotide"
atatttcacaggcaggagtccaattttcactcatcttgttacaagcttaa

SEQ ID NO: 1052 - DNA, 50 bp, Artificial Sequence; identical to SEQ ID NO: 1051
  source: /note="Description of Artificial Sequence: Synthetic oligonucleotide"

SEQ ID NO: 1053 - DNA, 50 bp, Artificial Sequence; identical to SEQ ID NO: 1051
  source: /note="Description of Artificial Sequence: Synthetic oligonucleotide"

SEQ ID NO: 1054 - DNA, 50 bp, Artificial Sequence
  source: /note="Description of Artificial Sequence: Synthetic oligonucleotide"
agtccaattttcactcatcttgttacaagcttaamaggactatggacact

SEQ ID NO: 1055 - DNA, 50 bp, Artificial Sequence; identical to SEQ ID NO: 1054
  source: /note="Description of Artificial Sequence: Synthetic oligonucleotide"

SEQ ID NO: 1056 - DNA, 50 bp, Artificial Sequence
  source: /note="Description of Artificial Sequence: Synthetic oligonucleotide"
agtccaattttcactcatcttgttacaagcttaaaaggactatggacact

SEQ ID NO: 1057 - DNA, 50 bp, Artificial Sequence
  source: /note="Description of Artificial Sequence: Synthetic oligonucleotide"
tccaattttcactcatcttgttacaagcttaaaaggactatggacactta

SEQ ID NO: 1058 - DNA, 50 bp, Artificial Sequence; identical to SEQ ID NO: 1057
  source: /note="Description of Artificial Sequence: Synthetic oligonucleotide"

SEQ ID NO: 1059 - DNA, 50 bp, Artificial Sequence; identical to SEQ ID NO: 1057
  source: /note="Description of Artificial Sequence: Synthetic oligonucleotide"

SEQ ID NO: 1060 - DNA, 50 bp, Artificial Sequence
  source: /note="Description of Artificial Sequence: Synthetic oligonucleotide"
ccaattttcactcatcttgttacaagcttaaaaggactatggacacttca

SEQ ID NO: 1061 - DNA, 50 bp, Artificial Sequence; identical to SEQ ID NO: 1060
  source: /note="Description of Artificial Sequence: Synthetic oligonucleotide"

SEQ ID NO: 1062 - DNA, 50 bp, Artificial Sequence; identical to SEQ ID NO: 1060
  source: /note="Description of Artificial Sequence: Synthetic oligonucleotide"

SEQ ID NO: 1063 - DNA, 50 bp, Artificial Sequence
  source: /note="Description of Artificial Sequence: Synthetic oligonucleotide"
aattttcactcatcttgttacaagcttaaaaggactatggacacttcgta

SEQ ID NO: 1064 - DNA, 50 bp, Artificial Sequence; identical to SEQ ID NO: 1063
  source: /note="Description of Artificial Sequence: Synthetic oligonucleotide"

SEQ ID NO: 1065 - DNA, 50 bp, Artificial Sequence
  source: /note="Description of Artificial Sequence: Synthetic oligonucleotide"
attcagagctttgtggaacagagtttcaaagtaaggctgccgtccgaagg

SEQ ID NO: 1066 - DNA, 50 bp, Artificial Sequence; identical to SEQ ID NO: 901
  source: /note="Description of Artificial Sequence: Synthetic oligonucleotide"

SEQ ID NO: 1067 - DNA, 50 bp, Artificial Sequence; identical to SEQ ID NO: 901
  source: /note="Description of Artificial Sequence: Synthetic oligonucleotide"

SEQ ID NO: 1068 - DNA, 50 bp, Artificial Sequence
  source: /note="Description of Artificial Sequence: Synthetic oligonucleotide"
ctcatcttgttacaagcttaaaaggactatggacacttcgtgccttcgga

SEQ ID NO: 1069 - DNA, 50 bp, Artificial Sequence; identical to SEQ ID NO: 1068
  source: /note="Description of Artificial Sequence: Synthetic oligonucleotide"

SEQ ID NO: 1070 - DNA, 50 bp, Artificial Sequence; identical to SEQ ID NO: 1068
  source: /note="Description of Artificial Sequence: Synthetic oligonucleotide"

SEQ ID NO: 1071 - DNA, 50 bp, Artificial Sequence
  source: /note="Description of Artificial Sequence: Synthetic oligonucleotide"
agtatgtaaattcagagctttgtggaacrgagtttcwaagtaaggctgct

SEQ ID NO: 1072 - DNA, 50 bp, Artificial Sequence; identical to SEQ ID NO: 1071
  source: /note="Description of Artificial Sequence: Synthetic oligonucleotide"

SEQ ID NO: 1073 - DNA, 50 bp, Artificial Sequence; identical to SEQ ID NO: 1071
  source: /note="Description of Artificial Sequence: Synthetic oligonucleotide"

SEQ ID NO: 1074 - DNA, 50 bp, Artificial Sequence
  source: /note="Description of Artificial Sequence: Synthetic oligonucleotide"
agaaccagttggcagtatgtaaattcagagctttgtggaacagagtttca

SEQ ID NO: 1075 - DNA, 50 bp, Artificial Sequence
  source: /note="Description of Artificial Sequence: Synthetic oligonucleotide"
agaaccagttggcagtatgtaaattcagagctttgtggaacagagtttct

SEQ ID NO: 1076 - DNA, 50 bp, Artificial Sequence; identical to SEQ ID NO: 1075
  source: /note="Description of Artificial Sequence: Synthetic oligonucleotide"

SEQ ID NO: 1077 - DNA, 50 bp, Artificial Sequence
  source: /note="Description of Artificial Sequence: Synthetic oligonucleotide"
acaggtacaagaaccagttggcagtatgtaaattcagagctttgtggaac

SEQ ID NO: 1078 - DNA, 50 bp, Artificial Sequence; identical to SEQ ID NO: 1077
  source: /note="Description of Artificial Sequence: Synthetic oligonucleotide"

SEQ ID NO: 1079 - DNA, 50 bp, Artificial Sequence; identical to SEQ ID NO: 1077
  source: /note="Description of Artificial Sequence: Synthetic oligonucleotide"

SEQ ID NO: 1080 - DNA, 50 bp, Artificial Sequence
  source: /note="Description of Artificial Sequence: Synthetic oligonucleotide"
ggacggcagccttactttgaaactcygttccacaaagctctgaatttaca

SEQ ID NO: 1081 - DNA, 50 bp, Artificial Sequence; identical to SEQ ID NO: 1080
  source: /note="Description of Artificial Sequence: Synthetic oligonucleotide"

SEQ ID NO: 1082 - DNA, 50 bp, Artificial Sequence; identical to SEQ ID NO: 1080
  source: /note="Description of Artificial Sequence: Synthetic oligonucleotide"

SEQ ID NO: 1083 - DNA, 50 bp, Artificial Sequence
  source: /note="Description of Artificial Sequence: Synthetic oligonucleotide"
catactgccaactggttcttgtacctgtcaacactgcgctggttccaaaa

SEQ ID NO: 1084 - DNA, 50 bp, Artificial Sequence
  source: /note="Description of Artificial Sequence: Synthetic oligonucleotide"
aatgaaggtaacagcaatgaagaagatgacaaaaatcatttctattctct

SEQ ID NO: 1085 - DNA, 50 bp, Artificial Sequence; identical to SEQ ID NO: 1084
  source: /note="Description of Artificial Sequence: Synthetic oligonucleotide"

SEQ ID NO: 1086 - DNA, 50 bp, Artificial Sequence
  source: /note="Description of Artificial Sequence: Synthetic oligonucleotide"
agccatgaatatcatgagtacattgcagtgggctgtaaactccagcatac

SEQ ID NO: 1087 - DNA, 50 bp, Artificial Sequence; identical to SEQ ID NO: 1086
  source: /note="Description of Artificial Sequence: Synthetic oligonucleotide"

SEQ ID NO: 1088 - DNA, 50 bp, Artificial Sequence; identical to SEQ ID NO: 1086
  source: /note="Description of Artificial Sequence: Synthetic oligonucleotide"

SEQ ID NO: 1089 - DNA, 50 bp, Artificial Sequence
  source: /note="Description of Artificial Sequence: Synthetic oligonucleotide"
tgacttggtaggtttaccttctgttggcatgtcaatgaacttaaagactc

SEQ ID NO: 1090 - DNA, 50 bp, Artificial Sequence; identical to SEQ ID NO: 1089
  source: /note="Description of Artificial Sequence: Synthetic oligonucleotide"

SEQ ID NO: 1091 - DNA, 50 bp, Artificial Sequence; identical to SEQ ID NO: 1089
  source: /note="Description of Artificial Sequence: Synthetic oligonucleotide"

SEQ ID NO: 1092 - DNA, 50 bp, Artificial Sequence; identical to SEQ ID NO: 1089
  source: /note="Description of Artificial Sequence: Synthetic oligonucleotide"

SEQ ID NO: 1093 - DNA, 50 bp, Artificial Sequence
  source: /note="Description of Artificial Sequence: Synthetic oligonucleotide"
tacacagaaggtggaaatgccatattagagaacatttccttctcaataag

SEQ ID NO: 1094 - DNA, 50 bp, Artificial Sequence; identical to SEQ ID NO: 1093
  source: /note="Description of Artificial Sequence: Synthetic oligonucleotide"

SEQ ID NO: 1095 - DNA, 50 bp, Artificial Sequence; identical to SEQ ID NO: 1093
  source: /note="Description of Artificial Sequence: Synthetic oligonucleotide"

SEQ ID NO: 1096 - DNA, 50 bp, Artificial Sequence
  source: /note="Description of Artificial Sequence: Synthetic oligonucleotide"
aattgcattgtaccatgaatagaacatttcctttcagggtgtcttactca

SEQ ID NO: 1097 - DNA, 50 bp, Artificial Sequence; identical to SEQ ID NO: 1096
  source: /note="Description of Artificial Sequence: Synthetic oligonucleotide"

SEQ ID NO: 1098 - DNA, 50 bp, Artificial Sequence; identical to SEQ ID NO: 1096
  source: /note="Description of Artificial Sequence: Synthetic oligonucleotide"

SEQ ID NO: 1099 - DNA, 50 bp, Artificial Sequence
  source: /note="Description of Artificial Sequence: Synthetic oligonucleotide"
tgtcacagaagtgatcccatcacttttaccttataggtgggcctcttgga

SEQ ID NO: 1100 - DNA, 50 bp, Artificial Sequence; identical to SEQ ID NO: 1099
  source: /note="Description of Artificial Sequence: Synthetic oligonucleotide"

SEQ ID NO: 1101 - DNA, 50 bp, Artificial Sequence; identical to SEQ ID NO: 1099
  source: /note="Description of Artificial Sequence: Synthetic oligonucleotide"

SEQ ID NO: 1102 - DNA, 50 bp, Artificial Sequence
  source: /note="Description of Artificial Sequence: Synthetic oligonucleotide"
atcccatcacttttaccttataggtgggcctcttgggaagaactggatca

SEQ ID NO: 1103 - DNA, 50 bp, Artificial Sequence
  source: /note="Description of Artificial Sequence: Synthetic oligonucleotide"
tccttcagtgttcagtagtctcaaaaaagctgataacaaagtactcttcc

SEQ ID NO: 1104 - DNA, 50 bp, Artificial Sequence; identical to SEQ ID NO: 1102
  source: /note="Description of Artificial Sequence: Synthetic oligonucleotide"

SEQ ID NO: 1105 - DNA, 50 bp, Artificial Sequence; identical to SEQ ID NO: 902
  source: /note="Description of Artificial Sequence: Synthetic oligonucleotide"

SEQ ID NO: 1106 - DNA, 50 bp, Artificial Sequence; identical to SEQ ID NO: 902
  source: /note="Description of Artificial Sequence: Synthetic oligonucleotide"

SEQ ID NO: 1107 - DNA, 50 bp, Artificial Sequence
  source: /note="Description of Artificial Sequence: Synthetic oligonucleotide"
ataggtgggcctcttgggaagaactggatcagggaagagtactttgttat

SEQ ID NO: 1108 - DNA, 50 bp, Artificial Sequence; identical to SEQ ID NO: 903
  source: /note="Description of Artificial Sequence: Synthetic oligonucleotide"

SEQ ID NO: 1109 - DNA, 50 bp, Artificial Sequence
  source: /note="Description of Artificial Sequence: Synthetic oligonucleotide"
aaggctttcctccactgttgcaaagttattgaatcccaagacacaccatt

SEQ ID NO: 1110 - DNA, 50 bp, Artificial Sequence
  source: /note="Description of Artificial Sequence: Synthetic oligonucleotide"
aaaggctttcctccactgttgcaaagttattgaatcccaagacacaccat

SEQ ID NO: 1111 - DNA, 50 bp, Artificial Sequence; identical to SEQ ID NO: 1110
  source: /note="Description of Artificial Sequence: Synthetic oligonucleotide"

SEQ ID NO: 1112 - DNA, 50 bp, Artificial Sequence
  source: /note="Description of Artificial Sequence: Synthetic oligonucleotide"
aaatccagatcgatggtgtgtcttgggattcaataactttgcaacagtga

SEQ ID NO: 1113 - DNA, 50 bp, Artificial Sequence; identical to SEQ ID NO: 1112
  source: /note="Description of Artificial Sequence: Synthetic oligonucleotide"

SEQ ID NO: 1114 - DNA, 50 bp, Artificial Sequence; identical to SEQ ID NO: 1112
  source: /note="Description of Artificial Sequence: Synthetic oligonucleotide"

SEQ ID NO: 1115 - DNA, 50 bp, Artificial Sequence
  source: /note="Description of Artificial Sequence: Synthetic oligonucleotide"
ctgcaactttccatatttcttgatcactccactgttcatagggatccaag

SEQ ID NO: 1116 - DNA, 50 bp, Artificial Sequence; identical to SEQ ID NO: 1115
  source: /note="Description of Artificial Sequence: Synthetic oligonucleotide"

SEQ ID NO: 1117 - DNA, 50 bp, Artificial Sequence; identical to SEQ ID NO: 1115
  source: /note="Description of Artificial Sequence: Synthetic oligonucleotide"

SEQ ID NO: 1118 - DNA, 50 bp, Artificial Sequence; identical to SEQ ID NO: 904
  source: /note="Description of Artificial Sequence: Synthetic oligonucleotide"

SEQ ID NO: 1119 - DNA, 50 bp, Artificial Sequence; identical to SEQ ID NO: 904
  source: /note="Description of Artificial Sequence: Synthetic oligonucleotide"

SEQ ID NO: 1120 - DNA, 50 bp, Artificial Sequence
  source: /note="Description of Artificial Sequence: Synthetic oligonucleotide"
cattcaccaccatgtcaaggtactccatctgtaccacggcatcataggta

SEQ ID NO: 1121 - DNA, 50 bp, Artificial Sequence; identical to SEQ ID NO: 1120
  source: /note="Description of Artificial Sequence: Synthetic oligonucleotide"

SEQ ID NO: 1122 - DNA, 50 bp, Artificial Sequence
  source: /note="Description of Artificial Sequence: Synthetic oligonucleotide"
ccaaggcttcatatgatgaagggtaatgtggtccaaacagggaagagata

SEQ ID NO: 1123 - DNA, 50 bp, Artificial Sequence; identical to SEQ ID NO: 1122
  source: /note="Description of Artificial Sequence: Synthetic oligonucleotide"

SEQ ID NO: 1124 - DNA, 50 bp, Artificial Sequence
  source: /note="Description of Artificial Sequence: Synthetic oligonucleotide"
tgaaatcaatggggtattcattcccaaagggtcaatggtggtgattccaa

SEQ ID NO: 1125 - DNA, 50 bp, Artificial Sequence; identical to SEQ ID NO: 1124
  source: /note="Description of Artificial Sequence: Synthetic oligonucleotide"

SEQ ID NO: 1126 - DNA, 50 bp, Artificial Sequence; identical to SEQ ID NO: 1124
  source: /note="Description of Artificial Sequence: Synthetic oligonucleotide"

SEQ ID NO: 1127 - DNA, 50 bp, Artificial Sequence; identical to SEQ ID NO: 1120
  source: /note="Description of Artificial Sequence: Synthetic oligonucleotide"

SEQ ID NO: 1128 - DNA, 50 bp, Artificial Sequence
  source: /note="Description of Artificial Sequence: Synthetic oligonucleotide"
tcttcccttcatctccaggggtcatcccctcaccttattgggcaaaactg

SEQ ID NO: 1129 - DNA, 50 bp, Artificial Sequence; identical to SEQ ID NO: 1128
  source: /note="Description of Artificial Sequence: Synthetic oligonucleotide"

SEQ ID NO: 1130 - DNA, 50 bp, Artificial Sequence; identical to SEQ ID NO: 1128
  source: /note="Description of Artificial Sequence: Synthetic oligonucleotide"

SEQ ID NO: 1131 - DNA, 50 bp, Artificial Sequence
  source: /note="Description of Artificial Sequence: Synthetic oligonucleotide"
atacttattgagagaaataatggatctaagaaaccaaattttaggaactt

SEQ ID NO: 1132 - DNA, 50 bp, Artificial Sequence; identical to SEQ ID NO: 1131
  source: /note="Description of Artificial Sequence: Synthetic oligonucleotide"

SEQ ID NO: 1133 - DNA, 50 bp, Artificial Sequence
  source: /note="Description of Artificial Sequence: Synthetic oligonucleotide"
aacatcgactctctcaacaatccacaagacccctttgtggagagcactaa

SEQ ID NO: 1134 - DNA, 50 bp, Artificial Sequence
  source: /note="Description of Artificial Sequence: Synthetic oligonucleotide"
ctaagaaaccaaattttaggaacttcttagtgctctccacaaaggggtct

SEQ ID NO: 1135 - DNA, 50 bp, Artificial Sequence; identical to SEQ ID NO: 1134
  source: /note="Description of Artificial Sequence: Synthetic oligonucleotide"

SEQ ID NO: 1136 - DNA, 50 bp, Artificial Sequence; identical to SEQ ID NO: 1134
  source: /note="Description of Artificial Sequence: Synthetic oligonucleotide"

SEQ ID NO: 1137 - DNA, 50 bp, Artificial Sequence
  source: /note="Description of Artificial Sequence: Synthetic oligonucleotide"
tccccagattcattctttacatttctaattaagactcatcttattttcat

SEQ ID NO: 1138 - DNA, 50 bp, Artificial Sequence
  source: /note="Description of Artificial Sequence: Synthetic oligonucleotide"
ccccagattcattctttacatttctaattaagactcatcttattttcata

SEQ ID NO: 1139 - DNA, 50 bp, Artificial Sequence; identical to SEQ ID NO: 1138
  source: /note="Description of Artificial Sequence: Synthetic oligonucleotide"

SEQ ID NO: 1140 - DNA, 50 bp, Artificial Sequence; identical to SEQ ID NO: 1122
  source: /note="Description of Artificial Sequence: Synthetic oligonucleotide"

SEQ ID NO: 1141 - DNA, 50 bp, Artificial Sequence
  source: /note="Description of Artificial Sequence: Synthetic oligonucleotide"
gtcacaatccctgtgacctgatttctgtttcactttgtagatatgggacc

SEQ ID NO: 1142 - DNA, 50 bp, Artificial Sequence; identical to SEQ ID NO: 1141
  source: /note="Description of Artificial Sequence: Synthetic oligonucleotide"

SEQ ID NO: 1143 - DNA, 50 bp, Artificial Sequence; identical to SEQ ID NO: 1141
  source: /note="Description of Artificial Sequence: Synthetic oligonucleotide"

SEQ ID NO: 1144 - DNA, 50 bp, Artificial Sequence
  source: /note="Description of Artificial Sequence: Synthetic oligonucleotide"
atcagcaagacactctctccctcacagaacgtgaagctccctgacgccta

SEQ ID NO: 1145 - DNA, 50 bp, Artificial Sequence
  source: /note="Description of Artificial Sequence: Synthetic oligonucleotide"
cggccacatcatggaactgcagcctcacctcggccttgcgctcgttcagg

SEQ ID NO: 1146 - DNA, 50 bp, Artificial Sequence
  source: /note="Description of Artificial Sequence: Synthetic oligonucleotide"
ccagtacgtggggaaccccgatggagagggcgaggccaccaaagggtacc

SEQ ID NO: 1147 - DNA, 50 bp, Artificial Sequence
  source: /note="Description of Artificial Sequence: Synthetic oligonucleotide"
tgcccaggtagtggtcgatgcggtagatctggtcctcacggaacagggag

SEQ ID NO: 1148 - DNA, 50 bp, Artificial Sequence; identical to SEQ ID NO: 1147
  source: /note="Description of Artificial Sequence: Synthetic oligonucleotide"

SEQ ID NO: 1149 - DNA, 50 bp, Artificial Sequence
  source: /note="Description of Artificial Sequence: Synthetic oligonucleotide"
ggcagtggtgggacacacttaccagatggtggggtagatcttcttcttgc

SEQ ID NO: 1150 - DNA, 50 bp, Artificial Sequence; identical to SEQ ID NO: 1149
  source: /note="Description of Artificial Sequence: Synthetic oligonucleotide"

SEQ ID NO: 1151 - DNA, 50 bp, Artificial Sequence
  source: /note="Description of Artificial Sequence: Synthetic oligonucleotide"
gggctcagagcttgtgggggttcacccacttgtaggtgccctcatactgg

SEQ ID NO: 1152 - DNA, 50 bp, Artificial Sequence; identical to SEQ ID NO: 1151
  source: /note="Description of Artificial Sequence: Synthetic oligonucleotide"

SEQ ID NO: 1153 - DNA, 50 bp, Artificial Sequence; identical to SEQ ID NO: 1151
  source: /note="Description of Artificial Sequence: Synthetic oligonucleotide"

SEQ ID NO: 1154 - DNA, 50 bp, Artificial Sequence
  source: /note="Description of Artificial Sequence: Synthetic oligonucleotide"
ccacccgtcactctccagccgaggccccacggaggcagacgagctgatga

SEQ ID NO: 1155 - DNA, 50 bp, Artificial Sequence; identical to SEQ ID NO: 1154
  source: /note="Description of Artificial Sequence: Synthetic oligonucleotide"

SEQ ID NO: 1156 - DNA, 50 bp, Artificial Sequence; identical to SEQ ID NO: 1154
  source: /note="Description of Artificial Sequence: Synthetic oligonucleotide"

SEQ ID NO: 1157 - DNA, 50 bp, Artificial Sequence
  source: /note="Description of Artificial Sequence: Synthetic oligonucleotide"
tgccctcatactggaaacccactctcttcatcagctcgtctgcctccgtg

SEQ ID NO: 1158 - DNA, 50 bp, Artificial Sequence; identical to SEQ ID NO: 1157
  source: /note="Description of Artificial Sequence: Synthetic oligonucleotide"

SEQ ID NO: 1159 - DNA, 50 bp, Artificial Sequence; identical to SEQ ID NO: 1157
  source: /note="Description of Artificial Sequence: Synthetic oligonucleotide"

SEQ ID NO: 1160 - DNA, 50 bp, Artificial Sequence
  source: /note="Description of Artificial Sequence: Synthetic oligonucleotide"
gccctcatactggaaacccactctcttcatcagctcgtctgcctccgtgg

SEQ ID NO: 1161 - DNA, 50 bp, Artificial Sequence; identical to SEQ ID NO: 1160
  source: /note="Description of Artificial Sequence: Synthetic oligonucleotide"

SEQ ID NO: 1162 - DNA, 50 bp, Artificial Sequence; identical to SEQ ID NO: 1160
  source: /note="Description of Artificial Sequence: Synthetic oligonucleotide"

SEQ ID NO: 1163 - DNA, 50 bp, Artificial Sequence
  source: /note="Description of Artificial Sequence: Synthetic oligonucleotide"
cctcatactggaaacccactctcttcatcagctcgtctgcctccgtgrrg

SEQ ID NO: 1164 - DNA, 50 bp, Artificial Sequence; identical to SEQ ID NO: 1163
  source: /note="Description of Artificial Sequence: Synthetic oligonucleotide"

SEQ ID NO: 1165 - DNA, 50 bp, Artificial Sequence; identical to SEQ ID NO: 1163
  source: /note="Description of Artificial Sequence: Synthetic oligonucleotide"

SEQ ID NO: 1166 - DNA, 50 bp, Artificial Sequence
  source: /note="Description of Artificial Sequence: Synthetic oligonucleotide"
ctcatactggaaacccactctcttcatcagctcgtctgcctccgtggggc

SEQ ID NO: 1167 - DNA, 50 bp, Artificial Sequence; identical to SEQ ID NO: 1166
  source: /note="Description of Artificial Sequence: Synthetic oligonucleotide"

SEQ ID NO: 1168 - DNA, 50 bp, Artificial Sequence; identical to SEQ ID NO: 1166
  source: /note="Description of Artificial Sequence: Synthetic oligonucleotide"

SEQ ID NO: 1169 - DNA, 50 bp, Artificial Sequence
  source: /note="Description of Artificial Sequence: Synthetic oligonucleotide"
ttcaccccactgctgcaccagattgagctggagaagcccaagcccatccg

SEQ ID NO: 1170 - DNA, 50 bp, Artificial Sequence; identical to SEQ ID NO: 1169
  source: /note="Description of Artificial Sequence: Synthetic oligonucleotide"

SEQ ID NO: 1171 - DNA, 50 bp, Artificial Sequence
  source: /note="Description of Artificial Sequence: Synthetic oligonucleotide"
gcgacgagctccgtgaggcctggcgtattttcaccccactgctgcaccag

SEQ ID NO: 1172 - DNA, 50 bp, Artificial Sequence; identical to SEQ ID NO: 1171
  source: /note="Description of Artificial Sequence: Synthetic oligonucleotide"

SEQ ID NO: 1173 - DNA, 50 bp, Artificial Sequence; identical to SEQ ID NO: 1171
  source: /note="Description of Artificial Sequence: Synthetic oligonucleotide"

SEQ ID NO: 1174 - DNA, 50 bp, Artificial Sequence
  source: /note="Description of Artificial Sequence: Synthetic oligonucleotide"
ccatgtcccctcagcgacgagctccgtgaggcctggcgtattttcacccc

SEQ ID NO: 1175 - DNA, 50 bp, Artificial Sequence; identical to SEQ ID NO: 1174
  source: /note="Description of Artificial Sequence: Synthetic oligonucleotide"

SEQ ID NO: 1176 - DNA, 50 bp, Artificial Sequence; identical to SEQ ID NO: 1174
  source: /note="Description of Artificial Sequence: Synthetic oligonucleotide"

SEQ ID NO: 1177 - DNA, 50 bp, Artificial Sequence
  source: /note="Description of Artificial Sequence: Synthetic oligonucleotide"
ctcccaagccataccatgtcccctcagcgacgagctccgtgaggcctggc

SEQ ID NO: 1178 - DNA, 50 bp, Artificial Sequence; identical to SEQ ID NO: 1177
  source: /note="Description of Artificial Sequence: Synthetic oligonucleotide"

SEQ ID NO: 1179 - DNA, 50 bp, Artificial Sequence; identical to SEQ ID NO: 1177
  source: /note="Description of Artificial Sequence: Synthetic oligonucleotide"

SEQ ID NO: 1180 - DNA, 50 bp, Artificial Sequence
  source: /note="Description of Artificial Sequence: Synthetic oligonucleotide"
ctcccaagccataccatgtcccctcagcgacgagctccgtgaggcctggt

SEQ ID NO: 1181 - DNA, 50 bp, Artificial Sequence
  source: /note="Description of Artificial Sequence: Synthetic oligonucleotide"
ggcttgggcttctccagctcaatctggtgcagcagtsgggtgaaaatact

SEQ ID NO: 1182 - DNA, 50 bp, Artificial Sequence
  source: /note="Description of Artificial Sequence: Synthetic oligonucleotide"
ctcccaagccataccatgtcccctcagcgacgagctccgtgaggcctgga

SEQ ID NO: 1183 - DNA, 50 bp, Artificial Sequence
  source: /note="Description of Artificial Sequence: Synthetic oligonucleotide"
gggcttctccagctcaatctggtgcagcagtggggtgaaaatacgccagg

SEQ ID NO: 1184 - DNA, 50 bp, Artificial Sequence; identical to SEQ ID NO: 1183
  source: /note="Description of Artificial Sequence: Synthetic oligonucleotide"

SEQ ID NO: 1185 - DNA, 50 bp, Artificial Sequence; identical to SEQ ID NO: 1183
  source: /note="Description of Artificial Sequence: Synthetic oligonucleotide"

SEQ ID NO: 1186 - DNA, 50 bp, Artificial Sequence
  source: /note="Description of Artificial Sequence: Synthetic oligonucleotide"
gcttctccagctcaatctggtgcagcagtsgggtgaaaataydccaggcg

SEQ ID NO: 1187 - DNA, 50 bp, Artificial Sequence; identical to SEQ ID NO: 1186
  source: /note="Description of Artificial Sequence: Synthetic oligonucleotide"

SEQ ID NO: 1188 - DNA, 50 bp, Artificial Sequence; identical to SEQ ID NO: 1186
  source: /note="Description of Artificial Sequence: Synthetic oligonucleotide"

SEQ ID NO: 1189 - DNA, 50 bp, Artificial Sequence
  source: /note="Description of Artificial Sequence: Synthetic oligonucleotide"
gtgccaccggcctcccaagccataccatgtcccctcagcgacgagctcct

SEQ ID NO: 1190 - DNA, 50 bp, Artificial Sequence; identical to SEQ ID NO: 1189
  source: /note="Description of Artificial Sequence: Synthetic oligonucleotide"

SEQ ID NO: 1191 - DNA, 50 bp, Artificial Sequence
  source: /note="Description of Artificial Sequence: Synthetic oligonucleotide"
ctccagctcaatctggtgcagcagtggggtgaaaatacdccaggystcaa

SEQ ID NO: 1192 - DNA, 50 bp, Artificial Sequence
  source: /note="Description of Artificial Sequence: Synthetic oligonucleotide"
aatctggtgcagcagtggggtgaaaatacgccaggcctcacggagctcgt

SEQ ID NO: 1193 - DNA, 50 bp, Artificial Sequence; identical to SEQ ID NO: 1192
  source: /note="Description of Artificial Sequence: Synthetic oligonucleotide"

SEQ ID NO: 1194 - DNA, 50 bp, Artificial Sequence; identical to SEQ ID NO: 1192
  source: /note="Description of Artificial Sequence: Synthetic oligonucleotide"

SEQ ID NO: 1195 - DNA, 50 bp, Artificial Sequence
  source: /note="Description of Artificial Sequence: Synthetic oligonucleotide"
atctggtgcagcagtggggtgaaaatacgccaggcctcacggagctcgtg

SEQ ID NO: 1196 - DNA, 50 bp, Artificial Sequence; identical to SEQ ID NO: 1195
  source: /note="Description of Artificial Sequence: Synthetic oligonucleotide"

SEQ ID NO: 1197 - DNA, 50 bp, Artificial Sequence; identical to SEQ ID NO: 1195
  source: /note="Description of Artificial Sequence: Synthetic oligonucleotide"

SEQ ID NO: 1198 - DNA, 50 bp, Artificial Sequence
  source: /note="Description of Artificial Sequence: Synthetic oligonucleotide"
ccaccccatagcccacaggtatgcaggggccggcagctgggcctcacctg

SEQ ID NO: 1199 - DNA, 50 bp, Artificial Sequence; identical to SEQ ID NO: 1198
  source: /note="Description of Artificial Sequence: Synthetic oligonucleotide"

SEQ ID NO: 1200 - DNA, 50 bp, Artificial Sequence
  source: /note="Description of Artificial Sequence: Synthetic oligonucleotide"
tgagcgcctcatcctggacgtcttctgcgggagccagatgcacttcgtgc

SEQ ID NO: 1201 - DNA, 50 bp, Artificial Sequence
  source: /note="Description of Artificial Sequence: Synthetic oligonucleotide"
atgagcgcctcatcctggacgtcttctgcgggagccagatgcacttcgtg

SEQ ID NO: 1202 - DNA, 50 bp, Artificial Sequence; identical to SEQ ID NO: 1201
  source: /note="Description of Artificial Sequence: Synthetic oligonucleotide"

SEQ ID NO: 1203 - DNA, 50 bp, Artificial Sequence
  source: /note="Description of Artificial Sequence: Synthetic oligonucleotide"
acgagcgcctcatcctggacgtcttctgcgggagccagatgcacttcgtg

SEQ ID NO: 1204 - DNA, 50 bp, Artificial Sequence
  source: /note="Description of Artificial Sequence: Synthetic oligonucleotide"
tatgagcgcctcatcctggacgtcttctgcgggagccagatgcacttcgt

SEQ ID NO: 1205 - DNA, 50 bp, Artificial Sequence; identical to SEQ ID NO: 1204
  source: /note="Description of Artificial Sequence: Synthetic oligonucleotide"

SEQ ID NO: 1206 - DNA, 50 bp, Artificial Sequence; identical to SEQ ID NO: 1204
  source: /note="Description of Artificial Sequence: Synthetic oligonucleotide"

SEQ ID NO: 1207 - DNA, 50 bp, Artificial Sequence
  source: /note="Description of Artificial Sequence: Synthetic oligonucleotide"
tccctgacgcctatgagcgcctcatcctggacgtcttctgcrggrgccag

SEQ ID NO: 1208 - DNA, 50 bp, Artificial Sequence; identical to SEQ ID NO: 1207
  source: /note="Description of Artificial Sequence: Synthetic oligonucleotide"

SEQ ID NO: 1209 - DNA, 50 bp, Artificial Sequence; identical to SEQ ID NO: 1207
  source: /note="Description of Artificial Sequence: Synthetic oligonucleotide"

SEQ ID NO: 1210 - DNA, 50 bp, Artificial Sequence
  source: /note="Description of Artificial Sequence: Synthetic oligonucleotide"
tgaagctccctgacgcctatgagcgcytcatcctggacgtcttctgcrgg

SEQ ID NO: 1211 - DNA, 50 bp, Artificial Sequence; identical to SEQ ID NO: 1210
  source: /note="Description of Artificial Sequence: Synthetic oligonucleotide"

SEQ ID NO: 1212 - DNA, 50 bp, Artificial Sequence; identical to SEQ ID NO: 1210
  source: /note="Description of Artificial Sequence: Synthetic oligonucleotide"

SEQ ID NO: 1213 - DNA, 50 bp, Artificial Sequence
  source: /note="Description of Artificial Sequence: Synthetic oligonucleotide"
gcaggggccggcagctgggcctcacctgcgcacgaagtgcatctggctcc

SEQ ID NO: 1214 - DNA, 50 bp, Artificial Sequence; identical to SEQ ID NO: 1213
  source: /note="Description of Artificial Sequence: Synthetic oligonucleotide"

SEQ ID NO: 1215 - DNA, 50 bp, Artificial Sequence
  source: /note="Description of Artificial Sequence: Synthetic oligonucleotide"
acgtgaagctccctgacgcctacgagcgcctcatcctggacgtcttctgc

SEQ ID NO: 1216 - DNA, 50 bp, Artificial Sequence
  source: /note="Description of Artificial Sequence: Synthetic oligonucleotide"
tcacctgcgcacgaagtgcatctggcyccygcagaagacgtccaggatga

SEQ ID NO: 1217 - DNA, 50 bp, Artificial Sequence
  source: /note="Description of Artificial Sequence: Synthetic oligonucleotide"
tcacctgcgcacgaagtgcatctggctcccgcagaagacgtccaggatga

SEQ ID NO: 1218 - DNA, 50 bp, Artificial Sequence; identical to SEQ ID NO: 1217
  source: /note="Description of Artificial Sequence: Synthetic oligonucleotide"

SEQ ID NO: 1219 - DNA, 50 bp, Artificial Sequence
  source: /note="Description of Artificial Sequence: Synthetic oligonucleotide"
cctgcgcacgaagtgcatctggctccygcagaagacgtccaggatgargc

SEQ ID NO: 1220 - DNA, 50 bp, Artificial Sequence
  source: /note="Description of Artificial Sequence: Synthetic oligonucleotide"
cctgcgcacgaagtgcatctggctcccgcagaagacgtccaggatgaggc

SEQ ID NO: 1221 - DNA, 50 bp, Artificial Sequence; identical to SEQ ID NO: 1220
  source: /note="Description of Artificial Sequence: Synthetic oligonucleotide"

SEQ ID NO: 1222 - DNA, 50 bp, Artificial Sequence; identical to SEQ ID NO: 1144
  source: /note="Description of Artificial Sequence: Synthetic oligonucleotide"

SEQ ID NO: 1223 - DNA, 50 bp, Artificial Sequence; identical to SEQ ID NO: 1144
  source: /note="Description of Artificial Sequence: Synthetic oligonucleotide"

SEQ ID NO: 1224 - DNA, 50 bp, Artificial Sequence
  source: /note="Description of Artificial Sequence: Synthetic oligonucleotide"
tcccgcagaagacgtccaggatgaggcgctcataggcgtcagggagcttc

SEQ ID NO: 1225 - DNA, 50 bp, Artificial Sequence
  source: /note="Description of Artificial Sequence: Synthetic oligonucleotide"
catggtggcaggcagtggcatcagcaagacactctctccctcacagaacr

SEQ ID NO: 1226 - DNA, 50 bp, Artificial Sequence; identical to SEQ ID NO: 1225
  source: /note="Description of Artificial Sequence: Synthetic oligonucleotide"

SEQ ID NO: 1227 - DNA, 50 bp, Artificial Sequence
  source: /note="Description of Artificial Sequence: Synthetic oligonucleotide"
acatggtggcaggcagtggcatcagcaagacactctctccctcacagaac

SEQ ID NO: 1228 - DNA, 50 bp, Artificial Sequence; identical to SEQ ID NO: 1227
  source: /note="Description of Artificial Sequence: Synthetic oligonucleotide"

SEQ ID NO: 1229 - DNA, 50 bp, Artificial Sequence; identical to SEQ ID NO: 1227
  source: /note="Description of Artificial Sequence: Synthetic oligonucleotide"

SEQ ID NO: 1230 - DNA, 50 bp, Artificial Sequence
  source: /note="Description of Artificial Sequence: Synthetic oligonucleotide"
gggcccaggccgcccaccctccacactgctccttctctgtagggcacctt

SEQ ID NO: 1231 - DNA, 50 bp, Artificial Sequence; identical to SEQ ID NO: 1230
  source: /note="Description of Artificial Sequence: Synthetic oligonucleotide"

SEQ ID NO: 1232 - DNA, 50 bp, Artificial Sequence; identical to SEQ ID NO: 1230
  source: /note="Description of Artificial Sequence: Synthetic oligonucleotide"

SEQ ID NO: 1233 - DNA, 50 bp, Artificial Sequence
  source: /note="Description of Artificial Sequence: Synthetic oligonucleotide"
gaccaagaagccgggcatgttcttcaaccccgaggagtcggagctggacg

SEQ ID NO: 1234 - DNA, 50 bp, Artificial Sequence
  source: /note="Description of Artificial Sequence: Synthetic oligonucleotide"
gaccaagaagccgggcatgttcttcaaccccraggagtcggagctggacg

SEQ ID NO: 1235 - DNA, 50 bp, Artificial Sequence; identical to SEQ ID NO: 1234
  source: /note="Description of Artificial Sequence: Synthetic oligonucleotide"

SEQ ID NO: 1236 - DNA, 50 bp, Artificial Sequence
  source: /note="Description of Artificial Sequence: Synthetic oligonucleotide"
gtagggcaccttgtatctgttgccgtaggtcasgtccagctccgactcct

SEQ ID NO: 1237 - DNA, 50 bp, Artificial Sequence
  source: /note="Description of Artificial Sequence: Synthetic oligonucleotide"
gtagggcaccttgtatctgttgccgtaggtcaggtccagctccgactcct

SEQ ID NO: 1238 - DNA, 50 bp, Artificial Sequence; identical to SEQ ID NO: 1237
  source: /note="Description of Artificial Sequence: Synthetic oligonucleotide"

SEQ ID NO: 1239 - DNA, 50 bp, Artificial Sequence
  source: /note="Description of Artificial Sequence: Synthetic oligonucleotide"
tctgttgccgtaggtcaggtccagctccgactcctyggggttgaagaaca

SEQ ID NO: 1240 - DNA, 50 bp, Artificial Sequence; identical to SEQ ID NO: 1239
  source: /note="Description of Artificial Sequence: Synthetic oligonucleotide"

SEQ ID NO: 1241 - DNA, 50 bp, Artificial Sequence
  source: /note="Description of Artificial Sequence: Synthetic oligonucleotide"
tctgttgccgtaggtcaggtccagctccgactcctcggggttgaagaaca

SEQ ID NO: 1242 - DNA, 50 bp, Artificial Sequence
  source: /note="Description of Artificial Sequence: Synthetic oligonucleotide"
gttgccgtaggtcaggtccagctccgactcctyggggttgaagaacaygg

SEQ ID NO: 1243 - DNA, 50 bp, Artificial Sequence
  source: /note="Description of Artificial Sequence: Synthetic oligonucleotide"
gtgcagcccaacgaggccgtgtacaccaagatgatgaccaagaagysgkc

SEQ ID NO: 1244 - DNA, 50 bp, Artificial Sequence
  source: /note="Description of Artificial Sequence: Synthetic oligonucleotide"
tgttgccgtaggtcaggtccagctccgactcctcggggttgaagaacatg

SEQ ID NO: 1245 - DNA, 50 bp, Artificial Sequence
  source: /note="Description of Artificial Sequence: Synthetic oligonucleotide"
gttgccgtaggtcaggtccagctccgactcctcggggttgaagaacatgc

SEQ ID NO: 1246 - DNA, 50 bp, Artificial Sequence
  source: /note="Description of Artificial Sequence: Synthetic oligonucleotide"
gttgccgtaggtcaggtccagctccgactcctyggggttgaagaacaygc

SEQ ID NO: 1247 - DNA, 50 bp, Artificial Sequence; identical to SEQ ID NO: 1245
  source: /note="Description of Artificial Sequence: Synthetic oligonucleotide"

SEQ ID NO: 1248 - DNA, 50 bp, Artificial Sequence
  source: /note="Description of Artificial Sequence: Synthetic oligonucleotide"
gccgtaggtcaggtccagctccgactcctcggggttgaagaacatgcccg

SEQ ID NO: 1249 - DNA, 50 bp, Artificial Sequence; identical to SEQ ID NO: 1248
  source: /note="Description of Artificial Sequence: Synthetic oligonucleotide"

SEQ ID NO: 1250 - DNA, 50 bp, Artificial Sequence; identical to SEQ ID NO: 1248
  source: /note="Description of Artificial Sequence: Synthetic oligonucleotide"

SEQ ID NO: 1251 - DNA, 50 bp, Artificial Sequence; identical to SEQ ID NO: 1248
  source: /note="Description of Artificial Sequence: Synthetic oligonucleotide"

SEQ ID NO: 1252 - DNA, 50 bp, Artificial Sequence; identical to SEQ ID NO: 1248
  source: /note="Description of Artificial Sequence: Synthetic oligonucleotide"

SEQ ID NO: 1253 - DNA, 50 bp, Artificial Sequence; identical to SEQ ID NO: 1248
  source: /note="Description of Artificial Sequence: Synthetic oligonucleotide"

SEQ ID NO: 1254 - DNA, 50 bp, Artificial Sequence
  source: /note="Description of Artificial Sequence: Synthetic oligonucleotide"
aggtcaggtccagctccgactcctcggggttgaagaacatgcccggcttc

SEQ ID NO: 1255 - DNA, 50 bp, Artificial Sequence
  source: /note="Description of Artificial Sequence: Synthetic oligonucleotide"
aggtcaggtccagctccgactcctcggggttgaagaacatgcmcsrcttc

SEQ ID NO: 1256 - DNA, 50 bp, Artificial Sequence; identical to SEQ ID NO: 1254
  source: /note="Description of Artificial Sequence: Synthetic oligonucleotide"

SEQ ID NO: 1257 - DNA, 50 bp, Artificial Sequence
  source: /note="Description of Artificial Sequence: Synthetic oligonucleotide"
aggtccagctccgactcctcggggttgaagaacatgcccsrcttcktggt

SEQ ID NO: 1258 - DNA, 50 bp, Artificial Sequence
  source: /note="Description of Artificial Sequence: Synthetic oligonucleotide"
aggtccagctccgactcctcggggttgaagaacatgcccggcttcttggt

SEQ ID NO: 1259 - DNA, 50 bp, Artificial Sequence; identical to SEQ ID NO: 1258
  source: /note="Description of Artificial Sequence: Synthetic oligonucleotide"

SEQ ID NO: 1260 - DNA, 50 bp, Artificial Sequence
  source: /note="Description of Artificial Sequence: Synthetic oligonucleotide"
ccgactcctcggggttgaagaacatgcccggcttcttggtcatcatcttg

SEQ ID NO: 1261 - DNA, 50 bp, Artificial Sequence; identical to SEQ ID NO: 1260
  source: /note="Description of Artificial Sequence: Synthetic oligonucleotide"

SEQ ID NO: 1262 - DNA, 50 bp, Artificial Sequence; identical to SEQ ID NO: 1260
  source: /note="Description of Artificial Sequence: Synthetic oligonucleotide"

SEQ ID NO: 1263 - DNA, 50 bp, Artificial Sequence
  source: /note="Description of Artificial Sequence: Synthetic oligonucleotide"
ccaccagcagtgcaagcgcaacgagctggtgatccgcstgcagcycaacr

SEQ ID NO: 1264 - DNA, 50 bp, Artificial Sequence
  source: /note="Description of Artificial Sequence: Synthetic oligonucleotide"
ccaccagcagtgcaagcgcaacgagctggtgatccgcgtgcagcccaacg

SEQ ID NO: 1265 - DNA, 50 bp, Artificial Sequence; identical to SEQ ID NO: 1264
  source: /note="Description of Artificial Sequence: Synthetic oligonucleotide"

SEQ ID NO: 1266 - DNA, 50 bp, Artificial Sequence
  source: /note="Description of Artificial Sequence: Synthetic oligonucleotide"
gttgaagaacatgcccggcttcttggtyatcatcttgktgtacacggcct

SEQ ID NO: 1267 - DNA, 50 bp, Artificial Sequence
  source: /note="Description of Artificial Sequence: Synthetic oligonucleotide"
tccaccagcagtgcaagcgcaacgagctggtgatccgcgtgcagcccaac

SEQ ID NO: 1268 - DNA, 50 bp, Artificial Sequence
  source: /note="Description of Artificial Sequence: Synthetic oligonucleotide"
gttgaagaacatgcccggcttcttggtcatcatcttggtgtacacggcct

SEQ ID NO: 1269 - DNA, 50 bp, Artificial Sequence
  source: /note="Description of Artificial Sequence: Synthetic oligonucleotide"
catcttccaccagcagtgcaagcgcaacgagctggtgatcsrcstgcagc

SEQ ID NO: 1270 - DNA, 50 bp, Artificial Sequence; identical to SEQ ID NO: 1269
  source: /note="Description of Artificial Sequence: Synthetic oligonucleotide"

SEQ ID NO: 1271 - DNA, 50 bp, Artificial Sequence
  source: /note="Description of Artificial Sequence: Synthetic oligonucleotide"
catcttccaccagcagtgcaagcgcaacgagctggtgatccgcgtgcagc

SEQ ID NO: 1272 - DNA, 50 bp, Artificial Sequence
  source: /note="Description of Artificial Sequence: Synthetic oligonucleotide"
cccggcttcttggtcatcatcttggtgtacacggccyygttgrgctgcac

SEQ ID NO: 1273 - DNA, 50 bp, Artificial Sequence; identical to SEQ ID NO: 1272
  source: /note="Description of Artificial Sequence: Synthetic oligonucleotide"

SEQ ID NO: 1274 - DNA, 50 bp, Artificial Sequence
  source: /note="Description of Artificial Sequence: Synthetic oligonucleotide"
cggcgacatcttccaccagcagtgcaagcgcaacgagctggtgatccgcg

SEQ ID NO: 1275 - DNA, 50 bp, Artificial Sequence
  source: /note="Description of Artificial Sequence: Synthetic oligonucleotide"
ggccggcgacatcttccaccagcagtgcaagcgcaacgagctggtgatcc

SEQ ID NO: 1276 - DNA, 50 bp, Artificial Sequence; identical to SEQ ID NO: 1275
  source: /note="Description of Artificial Sequence: Synthetic oligonucleotide"

SEQ ID NO: 1277 - DNA, 50 bp, Artificial Sequence; identical to SEQ ID NO: 1275
  source: /note="Description of Artificial Sequence: Synthetic oligonucleotide"

SEQ ID NO: 1278 - DNA, 50 bp, Artificial Sequence
  source: /note="Description of Artificial Sequence: Synthetic oligonucleotide"
ggccggcgacatcttccaccagcagtgcaagcgcracgrgctggtgaycg

SEQ ID NO: 1279 - DNA, 50 bp, Artificial Sequence; identical to SEQ ID NO: 1278
  source: /note="Description of Artificial Sequence: Synthetic oligonucleotide"

SEQ ID NO: 1280 - DNA, 50 bp, Artificial Sequence; identical to SEQ ID NO: 1278
  source: /note="Description of Artificial Sequence: Synthetic oligonucleotide"

SEQ ID NO: 1281 - DNA, 50 bp, Artificial Sequence
  source: /note="Description of Artificial Sequence: Synthetic oligonucleotide"
tgtggccggcgacatcttccaccagcagtgcaagcgcaacgagctggtga

SEQ ID NO: 1282 - DNA, 50 bp, Artificial Sequence; identical to SEQ ID NO: 1281
  source: /note="Description of Artificial Sequence: Synthetic oligonucleotide"

SEQ ID NO: 1283 - DNA, 50 bp, Artificial Sequence; identical to SEQ ID NO: 1281
  source: /note="Description of Artificial Sequence: Synthetic oligonucleotide"

SEQ ID NO: 1284 - DNA, 50 bp, Artificial Sequence
  source: /note="Description of Artificial Sequence: Synthetic oligonucleotide"
gttccatgatgtggccggcgacatcttccaccagcagtgcaagyrcracg

SEQ ID NO: 1285 - DNA, 50 bp, Artificial Sequence; identical to SEQ ID NO: 1284
  source: /note="Description of Artificial Sequence: Synthetic oligonucleotide"

SEQ ID NO: 1286 - DNA, 50 bp, Artificial Sequence; identical to SEQ ID NO: 1284
  source: /note="Description of Artificial Sequence: Synthetic oligonucleotide"

SEQ ID NO: 1287 - DNA, 50 bp, Artificial Sequence
  source: /note="Description of Artificial Sequence: Synthetic oligonucleotide"
catcttggtgtacacggcctcgttgggctgcacgcggatcaccagctcgt

SEQ ID NO: 1288 - DNA, 50 bp, Artificial Sequence
  source: /note="Description of Artificial Sequence: Synthetic oligonucleotide"
tgcagttccatgatgtggccggcgacatcttccaccagcagtgcragyrc

SEQ ID NO: 1289 - DNA, 50 bp, Artificial Sequence; identical to SEQ ID NO: 1288
  source: /note="Description of Artificial Sequence: Synthetic oligonucleotide"

SEQ ID NO: 1290 - DNA, 50 bp, Artificial Sequence
  source: /note="Description of Artificial Sequence: Synthetic oligonucleotide"
gctgcagttccatgatgtggccggcgacatcttccaccagcagtgcaagc

SEQ ID NO: 1291 - DNA, 50 bp, Artificial Sequence; identical to SEQ ID NO: 1290
  source: /note="Description of Artificial Sequence: Synthetic oligonucleotide"

SEQ ID NO: 1292 - DNA, 50 bp, Artificial Sequence; identical to SEQ ID NO: 1290
  source: /note="Description of Artificial Sequence: Synthetic oligonucleotide"

SEQ ID NO: 1293 - DNA, 50 bp, Artificial Sequence
  source: /note="Description of Artificial Sequence: Synthetic oligonucleotide"
ggctgcagttccatgatgtggccggcgacatcttccaccagcagtgcaag

SEQ ID NO: 1294 - DNA, 50 bp, Artificial Sequence; identical to SEQ ID NO: 1293
  source: /note="Description of Artificial Sequence: Synthetic oligonucleotide"

SEQ ID NO: 1295 - DNA, 50 bp, Artificial Sequence; identical to SEQ ID NO: 1293
  source: /note="Description of Artificial Sequence: Synthetic oligonucleotide"

SEQ ID NO: 1296 - DNA, 50 bp, Artificial Sequence; identical to SEQ ID NO: 1293
  source: /note="Description of Artificial Sequence: Synthetic oligonucleotide"

SEQ ID NO: 1297 - DNA, 50 bp, Artificial Sequence
  source: /note="Description of Artificial Sequence: Synthetic oligonucleotide"
tgaggctgcagttccatgatgtggccggcgacatcttccaccagcagtgc

SEQ ID NO: 1298 - DNA, 50 bp, Artificial Sequence; identical to SEQ ID NO: 1297
  source: /note="Description of Artificial Sequence: Synthetic oligonucleotide"

SEQ ID NO: 1299 - DNA, 50 bp, Artificial Sequence; identical to SEQ ID NO: 1297
  source: /note="Description of Artificial Sequence: Synthetic oligonucleotide"

SEQ ID NO: 1300 - DNA, 50 bp, Artificial Sequence
  source: /note="Description of Artificial Sequence: Synthetic oligonucleotide"
tgaggctgcagttccatgatgtggccggcgacatcytccaccagcagykc

SEQ ID NO: 1301 - DNA, 50 bp, Artificial Sequence; identical to SEQ ID NO: 1300
  source: /note="Description of Artificial Sequence: Synthetic oligonucleotide"

SEQ ID NO: 1302 - DNA, 50 bp, Artificial Sequence; identical to SEQ ID NO: 1297
  source: /note="Description of Artificial Sequence: Synthetic oligonucleotide"

SEQ ID NO: 1303 - DNA, 50 bp, Artificial Sequence
  source: /note="Description of Artificial Sequence: Synthetic oligonucleotide"
ggtgaggctgcagttccatgatgtggccggcgacatcttccaccagcagt

SEQ ID NO: 1304 - DNA, 50 bp, Artificial Sequence; identical to SEQ ID NO: 1303
  source: /note="Description of Artificial Sequence: Synthetic oligonucleotide"

SEQ ID NO: 1305 - DNA, 50 bp, Artificial Sequence; identical to SEQ ID NO: 1303
  source: /note="Description of Artificial Sequence: Synthetic oligonucleotide"

SEQ ID NO: 1306 - DNA, 50 bp, Artificial Sequence
  source: /note="Description of Artificial Sequence: Synthetic oligonucleotide"
aggtgaggctgcagttccatgatgtggccggcgacrycytccaccagcag

SEQ ID NO: 1307 - DNA, 50 bp, Artificial Sequence; identical to SEQ ID NO: 1306
  source: /note="Description of Artificial Sequence: Synthetic oligonucleotide"

SEQ ID NO: 1308 - DNA, 50 bp, Artificial Sequence
  source: /note="Description of Artificial Sequence: Synthetic oligonucleotide"
aggtgaggctgcagttccatgatgtggccggcgacatcttccaccagcag

SEQ ID NO: 1309 - DNA, 50 bp, Artificial Sequence
  source: /note="Description of Artificial Sequence: Synthetic oligonucleotide"
gttgggctgcacgcggatcaccagctcgttgcgcttgcactgctggtgga

SEQ ID NO: 1310 - DNA, 50 bp, Artificial Sequence; identical to SEQ ID NO: 1309
  source: /note="Description of Artificial Sequence: Synthetic oligonucleotide"

SEQ ID NO: 1311 - DNA, 50 bp, Artificial Sequence; identical to SEQ ID NO: 1309
  source: /note="Description of Artificial Sequence: Synthetic oligonucleotide"

SEQ ID NO: 1312 - DNA, 50 bp, Artificial Sequence
  source: /note="Description of Artificial Sequence: Synthetic oligonucleotide"
tgggctgcacgcggatcaccagctcgttgcgcttgcactgctggtggaag

SEQ ID NO: 1313 - DNA, 50 bp, Artificial Sequence; identical to SEQ ID NO: 1312
  source: /note="Description of Artificial Sequence: Synthetic oligonucleotide"

SEQ ID NO: 1314 - DNA, 50 bp, Artificial Sequence; identical to SEQ ID NO: 1312
  source: /note="Description of Artificial Sequence: Synthetic oligonucleotide"

SEQ ID NO: 1315 - DNA, 50 bp, Artificial Sequence
  source: /note="Description of Artificial Sequence: Synthetic oligonucleotide"
gggctgcacgcggatcaccagctcgttgcgcttgcactgctggtggaaga

SEQ ID NO: 1316 - DNA, 50 bp, Artificial Sequence; identical to SEQ ID NO: 1315
  source: /note="Description of Artificial Sequence: Synthetic oligonucleotide"

SEQ ID NO: 1317 - DNA, 50 bp, Artificial Sequence; identical to SEQ ID NO: 1315
  source: /note="Description of Artificial Sequence: Synthetic oligonucleotide"

SEQ ID NO: 1318 - DNA, 50 bp, Artificial Sequence
  source: /note="Description of Artificial Sequence: Synthetic oligonucleotide"
cacgcggatcaccagctcgttgcgcttgcactgctggtggaagatgtcgc

SEQ ID NO: 1319 - DNA, 50 bp, Artificial Sequence; identical to SEQ ID NO: 1318
  source: /note="Description of Artificial Sequence: Synthetic oligonucleotide"

SEQ ID NO: 1320 - DNA, 50 bp, Artificial Sequence; identical to SEQ ID NO: 1318
  source: /note="Description of Artificial Sequence: Synthetic oligonucleotide"

SEQ ID NO: 1321 - DNA, 50 bp, Artificial Sequence
  source: /note="Description of Artificial Sequence: Synthetic oligonucleotide"
aagatgtcgccggccacatcatggaaytgcagcctcacctcggcctygcg

SEQ ID NO: 1322 - DNA, 50 bp, Artificial Sequence
  source: /note="Description of Artificial Sequence: Synthetic oligonucleotide"
ctgctggtggaagatgtcgccggccacatcatggaactgcagcctcacct

SEQ ID NO: 1323 - DNA, 50 bp, Artificial Sequence
  source: /note="Description of Artificial Sequence: Synthetic oligonucleotide"
gtggaagatgtcgccggccacatcatggaactgcagcctcacctcggcct

SEQ ID NO: 1324 - DNA, 50 bp, Artificial Sequence; identical to SEQ ID NO: 1323
  source: /note="Description of Artificial Sequence: Synthetic oligonucleotide"

SEQ ID NO: 1325 - DNA, 50 bp, Artificial Sequence; identical to SEQ ID NO: 1323
  source: /note="Description of Artificial Sequence: Synthetic oligonucleotide"

SEQ ID NO: 1326 - DNA, 50 bp, Artificial Sequence
  source: /note="Description of Artificial Sequence: Synthetic oligonucleotide"
tgtcgccggccacatcatggaactgcagcctcacctcggcctygcgctct

SEQ ID NO: 1327 - DNA, 50 bp, Artificial Sequence
  source: /note="Description of Artificial Sequence: Synthetic oligonucleotide"
tccgccacgtaggggtgcccttcatcctgcgctgcggcaaggccctgaaa

SEQ ID NO: 1328 - DNA, 50 bp, Artificial Sequence
  source: /note="Description of Artificial Sequence: Synthetic oligonucleotide"
tccgccacgtaggggtgcccttcatcctgcgctgcggcaaggccctgaac

SEQ ID NO: 1329 - DNA, 50 bp, Artificial Sequence
  source: /note="Description of Artificial Sequence: Synthetic oligonucleotide"
atgtcgccggccacatcatggaactgcagcctcacctcggccttgcgctc

SEQ ID NO: 1330 - DNA, 50 bp, Artificial Sequence; identical to SEQ ID NO: 1145
  source: /note="Description of Artificial Sequence: Synthetic oligonucleotide"

SEQ ID NO: 1331 - DNA, 50 bp, Artificial Sequence; identical to SEQ ID NO: 1145
  source: /note="Description of Artificial Sequence: Synthetic oligonucleotide"

SEQ ID NO: 1332 - DNA, 50 bp, Artificial Sequence
  source: /note="Description of Artificial Sequence: Synthetic oligonucleotide"
gctgccctttccgccacgtaggggtgyccttcatcctgcgctgcggcaag

SEQ ID NO: 1333 - DNA, 50 bp, Artificial Sequence; identical to SEQ ID NO: 1332
  source: /note="Description of Artificial Sequence: Synthetic oligonucleotide"

SEQ ID NO: 1334 - DNA, 50 bp, Artificial Sequence; identical to SEQ ID NO: 1332
  source: /note="Description of Artificial Sequence: Synthetic oligonucleotide"

SEQ ID NO: 1335 - DNA, 50 bp, Artificial Sequence
  source: /note="Description of Artificial Sequence: Synthetic oligonucleotide"
caccctgagagagctggtgctgaggctgccctttccgccacgtaggggtg

SEQ ID NO: 1336 - DNA, 50 bp, Artificial Sequence
  source: /note="Description of Artificial Sequence: Synthetic oligonucleotide"
cacctcggccttgcgctcgttcagggccttgccgcagcgcaggatgaagg

SEQ ID NO: 1337 - DNA, 50 bp, Artificial Sequence; identical to SEQ ID NO: 1336
  source: /note="Description of Artificial Sequence: Synthetic oligonucleotide"

SEQ ID NO: 1338 - DNA, 50 bp, Artificial Sequence
  source: /note="Description of Artificial Sequence: Synthetic oligonucleotide"
gtccacaccctgagagagctggtgctgaggctgccctttccgccacgtag

SEQ ID NO: 1339 - DNA, 50 bp, Artificial Sequence; identical to SEQ ID NO: 1338
  source: /note="Description of Artificial Sequence: Synthetic oligonucleotide"

SEQ ID NO: 1340 - DNA, 50 bp, Artificial Sequence; identical to SEQ ID NO: 1338
  source: /note="Description of Artificial Sequence: Synthetic oligonucleotide"

SEQ ID NO: 1341 - DNA, 50 bp, Artificial Sequence
  source: /note="Description of Artificial Sequence: Synthetic oligonucleotide"
gggcatgcccagttctgccttgctgggcctcgaaggcatcacctaccatg

SEQ ID NO: 1342 - DNA, 50 bp, Artificial Sequence; identical to SEQ ID NO: 1341
  source: /note="Description of Artificial Sequence: Synthetic oligonucleotide"

SEQ ID NO: 1343 - DNA, 50 bp, Artificial Sequence; identical to SEQ ID NO: 1341
  source: /note="Description of Artificial Sequence: Synthetic oligonucleotide"

SEQ ID NO: 1344 - DNA, 50 bp, Artificial Sequence
  source: /note="Description of Artificial Sequence: Synthetic oligonucleotide"
gttctgccttgctgggcctcgaaggcatcacctaccatcccacctctcat

SEQ ID NO: 1345 - DNA, 50 bp, Artificial Sequence; identical to SEQ ID NO: 1344
  source: /note="Description of Artificial Sequence: Synthetic oligonucleotide"

SEQ ID NO: 1346 - DNA, 50 bp, Artificial Sequence; identical to SEQ ID NO: 1344
  source: /note="Description of Artificial Sequence: Synthetic oligonucleotide"

SEQ ID NO: 1347 - DNA, 50 bp, Artificial Sequence
  source: /note="Description of Artificial Sequence: Synthetic oligonucleotide"
tgggcctcgaaggcatcacctaccatcccacctctcattctccacataga

SEQ ID NO: 1348 - DNA, 50 bp, Artificial Sequence; identical to SEQ ID NO: 1347
  source: /note="Description of Artificial Sequence: Synthetic oligonucleotide"

SEQ ID NO: 1349 - DNA, 50 bp, Artificial Sequence; identical to SEQ ID NO: 1347
  source: /note="Description of Artificial Sequence: Synthetic oligonucleotide"

SEQ ID NO: 1350 - DNA, 50 bp, Artificial Sequence
  source: /note="Description of Artificial Sequence: Synthetic oligonucleotide"
cctaccatcccacctctcattctccacatagargacgacggctgcaaaag

SEQ ID NO: 1351 - DNA, 50 bp, Artificial Sequence; identical to SEQ ID NO: 1350
  source: /note="Description of Artificial Sequence: Synthetic oligonucleotide"

SEQ ID NO: 1352 - DNA, 50 bp, Artificial Sequence
  source: /note="Description of Artificial Sequence: Synthetic oligonucleotide"
cctaccatcccacctctcattctccacatagaggacgacggctgcaaaag

SEQ ID NO: 1353 - DNA, 50 bp, Artificial Sequence
  source: /note="Description of Artificial Sequence: Synthetic oligonucleotide"
taccatcccacctctcattctccacatagargacgacggctgcaaaagyg

SEQ ID NO: 1354 - DNA, 50 bp, Artificial Sequence
  source: /note="Description of Artificial Sequence: Synthetic oligonucleotide"
taccatcccacctctcattctccacatagaggacgacggctgcaaaagtg

SEQ ID NO: 1355 - DNA, 50 bp, Artificial Sequence; identical to SEQ ID NO: 1354
  source: /note="Description of Artificial Sequence: Synthetic oligonucleotide"

SEQ ID NO: 1356 - DNA, 50 bp, Artificial Sequence
  source: /note="Description of Artificial Sequence: Synthetic oligonucleotide"
accatcccacctctcattctccacatagaggacgacggctgcaaaagtgg

SEQ ID NO: 1357 - DNA, 50 bp, Artificial Sequence
  source: /note="Description of Artificial Sequence: Synthetic oligonucleotide"
accatcccacctctcattctccacatagargacgacggctgcaaaagygg

SEQ ID NO: 1358 - DNA, 50 bp, Artificial Sequence; identical to SEQ ID NO: 1356
  source: /note="Description of Artificial Sequence: Synthetic oligonucleotide"

SEQ ID NO: 1359 - DNA, 50 bp, Artificial Sequence
  source: /note="Description of Artificial Sequence: Synthetic oligonucleotide"
cattctccacatagaggacgacggctgcaaaagygkyggtggtggacccg

SEQ ID NO: 1360 - DNA, 50 bp, Artificial Sequence; identical to SEQ ID NO: 1359
  source: /note="Description of Artificial Sequence: Synthetic oligonucleotide"

SEQ ID NO: 1361 - DNA, 50 bp, Artificial Sequence; identical to SEQ ID NO: 1359
  source: /note="Description of Artificial Sequence: Synthetic oligonucleotide"

SEQ ID NO: 1362 - DNA, 50 bp, Artificial Sequence
  source: /note="Description of Artificial Sequence: Synthetic oligonucleotide"
ggtcctgggccagtacgtggggaaccccgatggagagggcraggccacca

SEQ ID NO: 1363 - DNA, 50 bp, Artificial Sequence; identical to SEQ ID NO: 1362
  source: /note="Description of Artificial Sequence: Synthetic oligonucleotide"

SEQ ID NO: 1364 - DNA, 50 bp, Artificial Sequence
  source: /note="Description of Artificial Sequence: Synthetic oligonucleotide"
ggtcctgggccagtacgtggggaaccccgatggagagggcgaggccacca

SEQ ID NO: 1365 - DNA, 50 bp, Artificial Sequence
  source: /note="Description of Artificial Sequence: Synthetic oligonucleotide"
agaggacgacggctgcaaaagtggcggtggtggacccgyggggcaccgtg

SEQ ID NO: 1366 - DNA, 50 bp, Artificial Sequence; identical to SEQ ID NO: 1365
  source: /note="Description of Artificial Sequence: Synthetic oligonucleotide"

SEQ ID NO: 1367 - DNA, 50 bp, Artificial Sequence; identical to SEQ ID NO: 1365
  source: /note="Description of Artificial Sequence: Synthetic oligonucleotide"

SEQ ID NO: 1368 - DNA, 50 bp, Artificial Sequence; identical to SEQ ID NO: 1146
  source: /note="Description of Artificial Sequence: Synthetic oligonucleotide"

SEQ ID NO: 1369 - DNA, 50 bp, Artificial Sequence
  source: /note="Description of Artificial Sequence: Synthetic oligonucleotide"
tgcaaaagtggcggtggtggacccgcggggcaccgtggggtcgtccaggt

SEQ ID NO: 1370 - DNA, 50 bp, Artificial Sequence; identical to SEQ ID NO: 1369
  source: /note="Description of Artificial Sequence: Synthetic oligonucleotide"

SEQ ID NO: 1371 - DNA, 50 bp, Artificial Sequence; identical to SEQ ID NO: 1369
  source: /note="Description of Artificial Sequence: Synthetic oligonucleotide"

SEQ ID NO: 1372 - DNA, 50 bp, Artificial Sequence
  source: /note="Description of Artificial Sequence: Synthetic oligonucleotide"
cctgggccagtacgtggggaaccccgatggagagggcraggccaccaaag

SEQ ID NO: 1373 - DNA, 50 bp, Artificial Sequence; identical to SEQ ID NO: 1372
  source: /note="Description of Artificial Sequence: Synthetic oligonucleotide"

SEQ ID NO: 1374 - DNA, 50 bp, Artificial Sequence; identical to SEQ ID NO: 1372
  source: /note="Description of Artificial Sequence: Synthetic oligonucleotide"

SEQ ID NO: 1375 - DNA, 50 bp, Artificial Sequence
  source: /note="Description of Artificial Sequence: Synthetic oligonucleotide"
ccaacaatgtggtcctgggccagtacgtggrgaaccccgatggagagggc

SEQ ID NO: 1376 - DNA, 50 bp, Artificial Sequence
  source: /note="Description of Artificial Sequence: Synthetic oligonucleotide"
ccaacaatgtggtcctgggccagtacgtggggaaccccgatggagagggc

SEQ ID NO: 1377 - DNA, 50 bp, Artificial Sequence; identical to SEQ ID NO: 1376
  source: /note="Description of Artificial Sequence: Synthetic oligonucleotide"

SEQ ID NO: 1378 - DNA, 50 bp, Artificial Sequence
  source: /note="Description of Artificial Sequence: Synthetic oligonucleotide"
tggggtcgtccaggtaccctttggtggcctygccctctccatcggggttc

SEQ ID NO: 1379 - DNA, 50 bp, Artificial Sequence
  source: /note="Description of Artificial Sequence: Synthetic oligonucleotide"
ccaggtaccctttggtggcctcgccctctccatcggggttcyccacgtag

SEQ ID NO: 1380 - DNA, 50 bp, Artificial Sequence; identical to SEQ ID NO: 1379
  source: /note="Description of Artificial Sequence: Synthetic oligonucleotide"

SEQ ID NO: 1381 - DNA, 50 bp, Artificial Sequence; identical to SEQ ID NO: 1379
  source: /note="Description of Artificial Sequence: Synthetic oligonucleotide"

SEQ ID NO: 1382 - DNA, 50 bp, Artificial Sequence
  source: /note="Description of Artificial Sequence: Synthetic oligonucleotide"
gtaccctttggtggcctcgccctctccatcggggttccccacgtactggc

SEQ ID NO: 1383 - DNA, 50 bp, Artificial Sequence
  source: /note="Description of Artificial Sequence: Synthetic oligonucleotide"
tcaaggtgttgaaatgcatctcagaggtgcaggccaacaatgtgktcctg

SEQ ID NO: 1384 - DNA, 50 bp, Artificial Sequence; identical to SEQ ID NO: 1383
  source: /note="Description of Artificial Sequence: Synthetic oligonucleotide"

SEQ ID NO: 1385 - DNA, 50 bp, Artificial Sequence
  source: /note="Description of Artificial Sequence: Synthetic oligonucleotide"
ctcaggtcaaggtgttgaaatgcatctcagaggtgcaggccaacaatgtg

SEQ ID NO: 1386 - DNA, 50 bp, Artificial Sequence; identical to SEQ ID NO: 1385
  source: /note="Description of Artificial Sequence: Synthetic oligonucleotide"

SEQ ID NO: 1387 - DNA, 50 bp, Artificial Sequence; identical to SEQ ID NO: 1385
  source: /note="Description of Artificial Sequence: Synthetic oligonucleotide"

SEQ ID NO: 1388 - DNA, 50 bp, Artificial Sequence
  source: /note="Description of Artificial Sequence: Synthetic oligonucleotide"
ctcaacacccaaggagcccattctctcccttggctttctctcaggtcaag

SEQ ID NO: 1389 - DNA, 50 bp, Artificial Sequence; identical to SEQ ID NO: 1388
  source: /note="Description of Artificial Sequence: Synthetic oligonucleotide"

SEQ ID NO: 1390 - DNA, 50 bp, Artificial Sequence; identical to SEQ ID NO: 1388
  source: /note="Description of Artificial Sequence: Synthetic oligonucleotide"

SEQ ID NO: 1391 - DNA, 50 bp, Artificial Sequence
  source: /note="Description of Artificial Sequence: Synthetic oligonucleotide"
gtgtctggtggccatggagaagcccgcctccaccaactcagatgacgtcc

SEQ ID NO: 1392 - DNA, 50 bp, Artificial Sequence; identical to SEQ ID NO: 1391
  source: /note="Description of Artificial Sequence: Synthetic oligonucleotide"

SEQ ID NO: 1393 - DNA, 50 bp, Artificial Sequence; identical to SEQ ID NO: 1391
  source: /note="Description of Artificial Sequence: Synthetic oligonucleotide"

SEQ ID NO: 1394 - DNA, 50 bp, Artificial Sequence
  source: /note="Description of Artificial Sequence: Synthetic oligonucleotide"
tgtgtctggtggccatggagaagcccgcctccaccaactcagatgacgtc

SEQ ID NO: 1395 - DNA, 50 bp, Artificial Sequence; identical to SEQ ID NO: 1394
  source: /note="Description of Artificial Sequence: Synthetic oligonucleotide"

SEQ ID NO: 1396 - DNA, 50 bp, Artificial Sequence; identical to SEQ ID NO: 1394
  source: /note="Description of Artificial Sequence: Synthetic oligonucleotide"

SEQ ID NO: 1397 - DNA, 50 bp, Artificial Sequence
  source: /note="Description of Artificial Sequence: Synthetic oligonucleotide"
gctgtgtctggtggccatggagaagcccgcctccaccaactcagatgacg

SEQ ID NO: 1398 - DNA, 50 bp, Artificial Sequence; identical to SEQ ID NO: 1397
  source: /note="Description of Artificial Sequence: Synthetic oligonucleotide"

SEQ ID NO: 1399 - DNA, 50 bp, Artificial Sequence; identical to SEQ ID NO: 1397
  source: /note="Description of Artificial Sequence: Synthetic oligonucleotide"

SEQ ID NO: 1400 - DNA, 50 bp, Artificial Sequence
  source: /note="Description of Artificial Sequence: Synthetic oligonucleotide"
atgctgtgtctggtggccatggagaagcccgcctccaccaactcagatga

SEQ ID NO: 1401 - DNA, 50 bp, Artificial Sequence; identical to SEQ ID NO: 1400
  source: /note="Description of Artificial Sequence: Synthetic oligonucleotide"

SEQ ID NO: 1402 - DNA, 50 bp, Artificial Sequence; identical to SEQ ID NO: 1400
  source: /note="Description of Artificial Sequence: Synthetic oligonucleotide"

SEQ ID NO: 1403 - DNA, 50 bp, Artificial Sequence
  source: /note="Description of Artificial Sequence: Synthetic oligonucleotide"
gatgctgtgtctggtggccatggagaagcccgcctccaccaactcagatg

SEQ ID NO: 1404 - DNA, 50 bp, Artificial Sequence; identical to SEQ ID NO: 1403
  source: /note="Description of Artificial Sequence: Synthetic oligonucleotide"

SEQ ID NO: 1405 - DNA, 50 bp, Artificial Sequence; identical to SEQ ID NO: 1403
  source: /note="Description of Artificial Sequence: Synthetic oligonucleotide"

SEQ ID NO: 1406 - DNA, 50 bp, Artificial Sequence
  source: /note="Description of Artificial Sequence: Synthetic oligonucleotide"
gcagatgctgtgtctggtggccatggagaagcccgccyycdccaactcag

SEQ ID NO: 1407 - DNA, 50 bp, Artificial Sequence; identical to SEQ ID NO: 1406
  source: /note="Description of Artificial Sequence: Synthetic oligonucleotide"

SEQ ID NO: 1408 - DNA, 50 bp, Artificial Sequence; identical to SEQ ID NO: 1406
  source: /note="Description of Artificial Sequence: Synthetic oligonucleotide"

SEQ ID NO: 1409 - DNA, 50 bp, Artificial Sequence
  source: /note="Description of Artificial Sequence: Synthetic oligonucleotide"
ccacctactgcagatgctgtgtctggtggccatggagaagcccgcctcca

SEQ ID NO: 1410 - DNA, 50 bp, Artificial Sequence; identical to SEQ ID NO: 1409
  source: /note="Description of Artificial Sequence: Synthetic oligonucleotide"

SEQ ID NO: 1411 - DNA, 50 bp, Artificial Sequence; identical to SEQ ID NO: 1409
  source: /note="Description of Artificial Sequence: Synthetic oligonucleotide"

SEQ ID NO: 1412 - DNA, 50 bp, Artificial Sequence
  source: /note="Description of Artificial Sequence: Synthetic oligonucleotide"
gaaccacctactgcagatgctgtgtctggtggccatggagaasyccgccy

SEQ ID NO: 1413 - DNA, 50 bp, Artificial Sequence; identical to SEQ ID NO: 1412
  source: /note="Description of Artificial Sequence: Synthetic oligonucleotide"

SEQ ID NO: 1414 - DNA, 50 bp, Artificial Sequence; identical to SEQ ID NO: 1412
  source: /note="Description of Artificial Sequence: Synthetic oligonucleotide"

SEQ ID NO: 1415 - DNA, 50 bp, Artificial Sequence
  source: /note="Description of Artificial Sequence: Synthetic oligonucleotide"
agaaccacctactgcagatgctgtgtctggtggccatggwgaasyccgcc

SEQ ID NO: 1416 - DNA, 50 bp, Artificial Sequence; identical to SEQ ID NO: 1415
  source: /note="Description of Artificial Sequence: Synthetic oligonucleotide"

SEQ ID NO: 1417 - DNA, 50 bp, Artificial Sequence; identical to SEQ ID NO: 1415
  source: /note="Description of Artificial Sequence: Synthetic oligonucleotide"

SEQ ID NO: 1418 - DNA, 50 bp, Artificial Sequence
  source: /note="Description of Artificial Sequence: Synthetic oligonucleotide"
tgcaccccctaccttctcatcacggacgtcatctgagttgghgrrggcgg

SEQ ID NO: 1419 - DNA, 50 bp, Artificial Sequence; identical to SEQ ID NO: 1418
  source: /note="Description of Artificial Sequence: Synthetic oligonucleotide"

SEQ ID NO: 1420 - DNA, 50 bp, Artificial Sequence
  source: /note="Description of Artificial Sequence: Synthetic oligonucleotide"
tgcaccccctaccttctcatcacggacgtcatctgagttggtggaggcgg

SEQ ID NO: 1421 - DNA, 50 bp, Artificial Sequence
  source: /note="Description of Artificial Sequence: Synthetic oligonucleotide"
caccccctaccttctcatcacggacgtcatctgagttggtggaggcgggg

SEQ ID NO: 1422 - DNA, 50 bp, Artificial Sequence; identical to SEQ ID NO: 1421
  source: /note="Description of Artificial Sequence: Synthetic oligonucleotide"

SEQ ID NO: 1423 - DNA, 50 bp, Artificial Sequence; identical to SEQ ID NO: 1421
  source: /note="Description of Artificial Sequence: Synthetic oligonucleotide"

SEQ ID NO: 1424 - DNA, 50 bp, Artificial Sequence
  source: /note="Description of Artificial Sequence: Synthetic oligonucleotide"
ccctaccttctcatcacggacgtcatctgagttggtggaggcgggcttct

SEQ ID NO: 1425 - DNA, 50 bp, Artificial Sequence
  source: /note="Description of Artificial Sequence: Synthetic oligonucleotide"
ccctaccttctcatcacggacgtcatctgagttggtggrggcggrsttct

SEQ ID NO: 1426 - DNA, 50 bp, Artificial Sequence; identical to SEQ ID NO: 1424
  source: /note="Description of Artificial Sequence: Synthetic oligonucleotide"

SEQ ID NO: 1427 - DNA, 50 bp, Artificial Sequence; identical to SEQ ID NO: 1424
  source: /note="Description of Artificial Sequence: Synthetic oligonucleotide"

SEQ ID NO: 1428 - DNA, 50 bp, Artificial Sequence; identical to SEQ ID NO: 1424
  source: /note="Description of Artificial Sequence: Synthetic oligonucleotide"

SEQ ID NO: 1429 - DNA, 50 bp, Artificial Sequence; identical to SEQ ID NO: 1424
  source: /note="Description of Artificial Sequence: Synthetic oligonucleotide"

SEQ ID NO: 1430 - DNA, 50 bp, Artificial Sequence
  source: /note="Description of Artificial Sequence: Synthetic oligonucleotide"
tcatcacggacgtcatctgagttggtggaggcgggcttctccatggccac

SEQ ID NO: 1431 - DNA, 50 bp, Artificial Sequence; identical to SEQ ID NO: 1430
  source: /note="Description of Artificial Sequence: Synthetic oligonucleotide"

SEQ ID NO: 1432 - DNA, 50 bp, Artificial Sequence; identical to SEQ ID NO: 1430
  source: /note="Description of Artificial Sequence: Synthetic oligonucleotide"

SEQ ID NO: 1433 - DNA, 50 bp, Artificial Sequence
  source: /note="Description of Artificial Sequence: Synthetic oligonucleotide"
cacggacgtcatctgagttggtggaggcgggcttctccatggccaccaga

SEQ ID NO: 1434 - DNA, 50 bp, Artificial Sequence; identical to SEQ ID NO: 1433
  source: /note="Description of Artificial Sequence: Synthetic oligonucleotide"

SEQ ID NO: 1435 - DNA, 50 bp, Artificial Sequence; identical to SEQ ID NO: 1433
  source: /note="Description of Artificial Sequence: Synthetic oligonucleotide"

SEQ ID NO: 1436 - DNA, 50 bp, Artificial Sequence
  source: /note="Description of Artificial Sequence: Synthetic oligonucleotide"
ctttggcactgagggtcgcgggggctatttcgatgaatttgggatcatcg

SEQ ID NO: 1437 - DNA, 50 bp, Artificial Sequence; identical to SEQ ID NO: 1436
  source: /note="Description of Artificial Sequence: Synthetic oligonucleotide"

SEQ ID NO: 1438 - DNA, 50 bp, Artificial Sequence; identical to SEQ ID NO: 1436
  source: /note="Description of Artificial Sequence: Synthetic oligonucleotide"

SEQ ID NO: 1439 - DNA, 50 bp, Artificial Sequence
  source: /note="Description of Artificial Sequence: Synthetic oligonucleotide"
gctctcaccggatgatcccaaattcatcgaaatagcccccgcgaccctca

SEQ ID NO: 1440 - DNA, 50 bp, Artificial Sequence; identical to SEQ ID NO: 1439
  source: /note="Description of Artificial Sequence: Synthetic oligonucleotide"

SEQ ID NO: 1441 - DNA, 50 bp, Artificial Sequence; identical to SEQ ID NO: 1439
  source: /note="Description of Artificial Sequence: Synthetic oligonucleotide"

SEQ ID NO: 1442 - DNA, 50 bp, Artificial Sequence
  source: /note="Description of Artificial Sequence: Synthetic oligonucleotide"
tcccaaattcatcgaaatagcccccgcgaccctcagtgccaaagggctcc

SEQ ID NO: 1443 - DNA, 50 bp, Artificial Sequence; identical to SEQ ID NO: 1442
  source: /note="Description of Artificial Sequence: Synthetic oligonucleotide"

SEQ ID NO: 1444 - DNA, 50 bp, Artificial Sequence; identical to SEQ ID NO: 1442
  source: /note="Description of Artificial Sequence: Synthetic oligonucleotide"

SEQ ID NO: 1445 - DNA, 50 bp, Artificial Sequence
  source: /note="Description of Artificial Sequence: Synthetic oligonucleotide"
atcgaaatagcccccgcgaccctcagtgccaaagggctccttgaaggtga

SEQ ID NO: 1446 - DNA, 50 bp, Artificial Sequence
  source: /note="Description of Artificial Sequence: Synthetic oligonucleotide"
atcgaaatagcccccgcgaccctcagtgccaaagggctccytgaaggtga

SEQ ID NO: 1447 - DNA, 50 bp, Artificial Sequence; identical to SEQ ID NO: 1446
  source: /note="Description of Artificial Sequence: Synthetic oligonucleotide"

SEQ ID NO: 1448 - DNA, 50 bp, Artificial Sequence
  source: /note="Description of Artificial Sequence: Synthetic oligonucleotide"
agcccccgcgaccctcagtgccaaagggctccttgaaggtgaggataacg

SEQ ID NO: 1449 - DNA, 50 bp, Artificial Sequence; identical to SEQ ID NO: 1448
  source: /note="Description of Artificial Sequence: Synthetic oligonucleotide"

SEQ ID NO: 1450 - DNA, 50 bp, Artificial Sequence; identical to SEQ ID NO: 1448
  source: /note="Description of Artificial Sequence: Synthetic oligonucleotide"

SEQ ID NO: 1451 - DNA, 50 bp, Artificial Sequence
  source: /note="Description of Artificial Sequence: Synthetic oligonucleotide"
accctcagtgccaaagggctccttgaaggtgargataacgyaggcgatgt

SEQ ID NO: 1452 - DNA, 50 bp, Artificial Sequence
  source: /note="Description of Artificial Sequence: Synthetic oligonucleotide"
accctcagtgccaaagggctccttgaaggtgaggataacgcaggcgatgt

SEQ ID NO: 1453 - DNA, 50 bp, Artificial Sequence; identical to SEQ ID NO: 1452
  source: /note="Description of Artificial Sequence: Synthetic oligonucleotide"

SEQ ID NO: 1454 - DNA, 50 bp, Artificial Sequence
  source: /note="Description of Artificial Sequence: Synthetic oligonucleotide"
agtgccaaagggctccttgaaggtgaggataacgcaggcgatgttgtcca

SEQ ID NO: 1455 - DNA, 50 bp, Artificial Sequence; identical to SEQ ID NO: 1454
  source: /note="Description of Artificial Sequence: Synthetic oligonucleotide"

SEQ ID NO: 1456 - DNA, 50 bp, Artificial Sequence; identical to SEQ ID NO: 1454
  source: /note="Description of Artificial Sequence: Synthetic oligonucleotide"

SEQ ID NO: 1457 - DNA, 50 bp, Artificial Sequence
  source: /note="Description of Artificial Sequence: Synthetic oligonucleotide"
ttgcccctccctgcagatttgccaacaggatcttcggccccatctggaac

SEQ ID NO: 1458 - DNA, 50 bp, Artificial Sequence
  source: /note="Description of Artificial Sequence: Synthetic oligonucleotide"
agtgccaaagggctccttgaaggtgaggataacgcaggcgatgttgtccc

SEQ ID NO: 1459 - DNA, 50 bp, Artificial Sequence; identical to SEQ ID NO: 1458
  source: /note="Description of Artificial Sequence: Synthetic oligonucleotide"

SEQ ID NO: 1460 - DNA, 50 bp, Artificial Sequence
  source: /note="Description of Artificial Sequence: Synthetic oligonucleotide"
cgcaggcgatgttgtcccggttccagatggggccgaagatcctgttggca

SEQ ID NO: 1461 - DNA, 50 bp, Artificial Sequence; identical to SEQ ID NO: 1460
  source: /note="Description of Artificial Sequence: Synthetic oligonucleotide"

SEQ ID NO: 1462 - DNA, 50 bp, Artificial Sequence; identical to SEQ ID NO: 1460
  source: /note="Description of Artificial Sequence: Synthetic oligonucleotide"

SEQ ID NO: 1463 - DNA, 50 bp, Artificial Sequence
  source: /note="Description of Artificial Sequence: Synthetic oligonucleotide"
ctaccgcatcgaccactacctgggcaaggagatggtgcagaacctcrtgt

SEQ ID NO: 1464 - DNA, 50 bp, Artificial Sequence
  source: /note="Description of Artificial Sequence: Synthetic oligonucleotide"
ctaccgcatcgaccactacctgggcaaggagatggtgcagaacctcatgt

SEQ ID NO: 1465 - DNA, 50 bp, Artificial Sequence; identical to SEQ ID NO: 1464
  source: /note="Description of Artificial Sequence: Synthetic oligonucleotide"

SEQ ID NO: 1466 - DNA, 50 bp, Artificial Sequence
  source: /note="Description of Artificial Sequence: Synthetic oligonucleotide"
agatctaccgcatcgaccactacctgggcaaggagatggtgcagaacctc

SEQ ID NO: 1467 - DNA, 50 bp, Artificial Sequence; identical to SEQ ID NO: 1466
  source: /note="Description of Artificial Sequence: Synthetic oligonucleotide"

SEQ ID NO: 1468 - DNA, 50 bp, Artificial Sequence; identical to SEQ ID NO: 1466
  source: /note="Description of Artificial Sequence: Synthetic oligonucleotide"

SEQ ID NO: 1469 - DNA, 50 bp, Artificial Sequence
  source: /note="Description of Artificial Sequence: Synthetic oligonucleotide"
cctcagcaccatgaggttctgcaccatctccttgcccaggtagtggtcga

SEQ ID NO: 1470 - DNA, 50 bp, Artificial Sequence; identical to SEQ ID NO: 1469
  source: /note="Description of Artificial Sequence: Synthetic oligonucleotide"

SEQ ID NO: 1471 - DNA, 50 bp, Artificial Sequence
  source: /note="Description of Artificial Sequence: Synthetic oligonucleotide"
ggctgtccaaccacatctcctccctgttccgtgaggaccagatctaccgc

SEQ ID NO: 1472 - DNA, 50 bp, Artificial Sequence
  source: /note="Description of Artificial Sequence: Synthetic oligonucleotide"
cagcaccatgaggttctgcaccatctccttgcccaggtagtggtcgaygg

SEQ ID NO: 1473 - DNA, 50 bp, Artificial Sequence; identical to SEQ ID NO: 1472
  source: /note="Description of Artificial Sequence: Synthetic oligonucleotide"

SEQ ID NO: 1474 - DNA, 50 bp, Artificial Sequence; identical to SEQ ID NO: 1472
  source: /note="Description of Artificial Sequence: Synthetic oligonucleotide"

SEQ ID NO: 1475 - DNA, 50 bp, Artificial Sequence
  source: /note="Description of Artificial Sequence: Synthetic oligonucleotide"
agcaccatgaggttctgcaccatctccttgcccaggtagtggtcgaygca

SEQ ID NO: 1476 - DNA, 50 bp, Artificial Sequence
  source: /note="Description of Artificial Sequence: Synthetic oligonucleotide"
cagcaccatgaggttctgcaccatctccttgcccaggtagtggtcgatgc

SEQ ID NO: 1477 - DNA, 50 bp, Artificial Sequence; identical to SEQ ID NO: 1476
  source: /note="Description of Artificial Sequence: Synthetic oligonucleotide"

SEQ ID NO: 1478 - DNA, 50 bp, Artificial Sequence
  source: /note="Description of Artificial Sequence: Synthetic oligonucleotide"
ccatctccttgcccaggtagtggtcgaygbrgtagatctggtcctcacgc

SEQ ID NO: 1479 - DNA, 50 bp, Artificial Sequence; identical to SEQ ID NO: 1478
  source: /note="Description of Artificial Sequence: Synthetic oligonucleotide"

SEQ ID NO: 1480 - DNA, 50 bp, Artificial Sequence
  source: /note="Description of Artificial Sequence: Synthetic oligonucleotide"
ccatctccttgcccaggtagtggtcgatgcggtagatctggtcctcacgc

SEQ ID NO: 1481 - DNA, 50 bp, Artificial Sequence
  source: /note="Description of Artificial Sequence: Synthetic oligonucleotide"
cccaggtagtggtcgatgcggtagatctggtcctcacgsaacagggagga

SEQ ID NO: 1482 - DNA, 50 bp, Artificial Sequence
  source: /note="Description of Artificial Sequence: Synthetic oligonucleotide"
cccaggtagtggtcgatgcggtagatctggtcctcacggaacagggagga

SEQ ID NO: 1483 - DNA, 50 bp, Artificial Sequence; identical to SEQ ID NO: 1482
  source: /note="Description of Artificial Sequence: Synthetic oligonucleotide"

SEQ ID NO: 1484 - DNA, 50 bp, Artificial Sequence; identical to SEQ ID NO: 1147
  source: /note="Description of Artificial Sequence: Synthetic oligonucleotide"

SEQ ID NO: 1485 - DNA, 50 bp, Artificial Sequence
  source: /note="Description of Artificial Sequence: Synthetic oligonucleotide"
gcggtagatctggtcctcacggaacagggagragatgtggttggacagcc

SEQ ID NO: 1486 - DNA, 50 bp, Artificial Sequence; identical to SEQ ID NO: 1485
  source: /note="Description of Artificial Sequence: Synthetic oligonucleotide"

SEQ ID NO: 1487 - DNA, 50 bp, Artificial Sequence
  source: /note="Description of Artificial Sequence: Synthetic oligonucleotide"
gcggtagatctggtcctcacggaacagggaggagatgtggttggacagcc

SEQ ID NO: 1488 - DNA, 50 bp, Artificial Sequence
  source: /note="Description of Artificial Sequence: Synthetic oligonucleotide"
gtagatctggtcctcacggaacagggaggagatgtggttggacagccggt

SEQ ID NO: 1489 - DNA, 50 bp, Artificial Sequence
  source: /note="Description of Artificial Sequence: Synthetic oligonucleotide"
gtagatctggtcctcacggaacagggagragatgtggttggacagccrga

SEQ ID NO: 1490 - DNA, 50 bp, Artificial Sequence
  source: /note="Description of Artificial Sequence: Synthetic oligonucleotide"
gtagatctggtcctcacggaacagggaggagatgtggttggacagccgga

SEQ ID NO: 1491 - DNA, 50 bp, Artificial Sequence
  source: /note="Description of Artificial Sequence: Synthetic oligonucleotide"
tggtcctcacggaacagggaggagatgtggttggacagccrgwcagagct

SEQ ID NO: 1492 - DNA, 50 bp, Artificial Sequence; identical to SEQ ID NO: 1491
  source: /note="Description of Artificial Sequence: Synthetic oligonucleotide"

SEQ ID NO: 1493 - DNA, 50 bp, Artificial Sequence; identical to SEQ ID NO: 1491
  source: /note="Description of Artificial Sequence: Synthetic oligonucleotide"

SEQ ID NO: 1494 - DNA, 50 bp, Artificial Sequence; identical to SEQ ID NO: 1491
  source: /note="Description of Artificial Sequence: Synthetic oligonucleotide"

SEQ ID NO: 1495 - DNA, 50 bp, Artificial Sequence
  source: /note="Description of Artificial Sequence: Synthetic oligonucleotide"
cacggaacagggaggagatgtggttggacagccggtcagagctctgcagg

SEQ ID NO: 1496 - DNA, 50 bp, Artificial Sequence; identical to SEQ ID NO: 1495
  source: /note="Description of Artificial Sequence: Synthetic oligonucleotide"

SEQ ID NO: 1497 - DNA, 50 bp, Artificial Sequence; identical to SEQ ID NO: 1495
  source: /note="Description of Artificial Sequence: Synthetic oligonucleotide"

SEQ ID NO: 1498 - DNA, 50 bp, Artificial Sequence
  source: /note="Description of Artificial Sequence: Synthetic oligonucleotide"
gggaggagatgtggttggacagccggtcagagctctgcaggtccctcccc

SEQ ID NO: 1499 - DNA, 50 bp, Artificial Sequence; identical to SEQ ID NO: 1498
  source: /note="Description of Artificial Sequence: Synthetic oligonucleotide"

SEQ ID NO: 1500 - DNA, 50 bp, Artificial Sequence; identical to SEQ ID NO: 1498
  source: /note="Description of Artificial Sequence: Synthetic oligonucleotide"

SEQ ID NO: 1501 - DNA, 50 bp, Artificial Sequence
  source: /note="Description of Artificial Sequence: Synthetic oligonucleotide"
ctccgggctcccagcagaggctggaaccgcatcatcgtggagaagccctt

SEQ ID NO: 1502 - DNA, 50 bp, Artificial Sequence
  source: /note="Description of Artificial Sequence: Synthetic oligonucleotide"
ggaggagatgtggttggacagccggtcagagctctgcaggtccctcccga

SEQ ID NO: 1503 - DNA, 50 bp, Artificial Sequence; identical to SEQ ID NO: 1502
  source: /note="Description of Artificial Sequence: Synthetic oligonucleotide"

SEQ ID NO: 1504 - DNA, 50 bp, Artificial Sequence; identical to SEQ ID NO: 1502
  source: /note="Description of Artificial Sequence: Synthetic oligonucleotide"

SEQ ID NO: 1505 - DNA, 50 bp, Artificial Sequence
  source: /note="Description of Artificial Sequence: Synthetic oligonucleotide"
ggagatgtggttggacagccggtcagagctctgcaggyccctcccsargg

SEQ ID NO: 1506 - DNA, 50 bp, Artificial Sequence
  source: /note="Description of Artificial Sequence: Synthetic oligonucleotide"
ggagatgtggttggacagccggtcagagctctgcaggtccctcccgaagg

SEQ ID NO: 1507 - DNA, 50 bp, Artificial Sequence; identical to SEQ ID NO: 1506
  source: /note="Description of Artificial Sequence: Synthetic oligonucleotide"

SEQ ID NO: 1508 - DNA, 50 bp, Artificial Sequence
  source: /note="Description of Artificial Sequence: Synthetic oligonucleotide"
gccggtcagagctctgcaggtccctcccsarggrcttctccacgatgatg

SEQ ID NO: 1509 - DNA, 50 bp, Artificial Sequence; identical to SEQ ID NO: 1508
  source: /note="Description of Artificial Sequence: Synthetic oligonucleotide"

SEQ ID NO: 1510 - DNA, 50 bp, Artificial Sequence; identical to SEQ ID NO: 1508
  source: /note="Description of Artificial Sequence: Synthetic oligonucleotide"

SEQ ID NO: 1511 - DNA, 50 bp, Artificial Sequence
  source: /note="Description of Artificial Sequence: Synthetic oligonucleotide"
ccggtcagagctctgcaggtccctcccsarggrcttctccacgatgatgc

SEQ ID NO: 1512 - DNA, 50 bp, Artificial Sequence; identical to SEQ ID NO: 1511
  source: /note="Description of Artificial Sequence: Synthetic oligonucleotide"

SEQ ID NO: 1513 - DNA, 50 bp, Artificial Sequence
  source: /note="Description of Artificial Sequence: Synthetic oligonucleotide"
ccggtcagagctctgcaggtccctcccgaagggcttctccacgatgatgc

SEQ ID NO: 1514 - DNA, 50 bp, Artificial Sequence; identical to SEQ ID NO: 1513
  source: /note="Description of Artificial Sequence: Synthetic oligonucleotide"

SEQ ID NO: 1515 - DNA, 50 bp, Artificial Sequence
  source: /note="Description of Artificial Sequence: Synthetic oligonucleotide"
gtcagagctctgcaggtccctcccgaagggcttctccacgatgatgcggt

SEQ ID NO: 1516 - DNA, 50 bp, Artificial Sequence; identical to SEQ ID NO: 1515
  source: /note="Description of Artificial Sequence: Synthetic oligonucleotide"

SEQ ID NO: 1517 - DNA, 50 bp, Artificial Sequence; identical to SEQ ID NO: 1515
  source: /note="Description of Artificial Sequence: Synthetic oligonucleotide"

SEQ ID NO: 1518 - DNA, 50 bp, Artificial Sequence
  source: /note="Description of Artificial Sequence: Synthetic oligonucleotide"
agctctgcaggtccctcccgaagggcttctccacgatgatgcggttccag

SEQ ID NO: 1519 - DNA, 50 bp, Artificial Sequence
  source: /note="Description of Artificial Sequence: Synthetic oligonucleotide"
ccccgaagaggggttcaagggggtaacgcagctccgggctcccagcagar

SEQ ID NO: 1520 - DNA, 50 bp, Artificial Sequence; identical to SEQ ID NO: 1519
  source: /note="Description of Artificial Sequence: Synthetic oligonucleotide"

SEQ ID NO: 1521 - DNA, 50 bp, Artificial Sequence
  source: /note="Description of Artificial Sequence: Synthetic oligonucleotide"
gctctgcaggtccctcccgaagggcttctccacgatgatgcggttccagc

SEQ ID NO: 1522 - DNA, 50 bp, Artificial Sequence; identical to SEQ ID NO: 1521
  source: /note="Description of Artificial Sequence: Synthetic oligonucleotide"

SEQ ID NO: 1523 - DNA, 50 bp, Artificial Sequence; identical to SEQ ID NO: 1521
  source: /note="Description of Artificial Sequence: Synthetic oligonucleotide"

SEQ ID NO: 1524 - DNA, 50 bp, Artificial Sequence; identical to SEQ ID NO: 1521
  source: /note="Description of Artificial Sequence: Synthetic oligonucleotide"

SEQ ID NO: 1525 - DNA, 50 bp, Artificial Sequence
  source: /note="Description of Artificial Sequence: Synthetic oligonucleotide"
ccccgaccgtctacgaggccgtcaccaagaacattcacgagtcctgcatc

SEQ ID NO: 1526 - DNA, 50 bp, Artificial Sequence; identical to SEQ ID NO: 1525
  source: /note="Description of Artificial Sequence: Synthetic oligonucleotide"

SEQ ID NO: 1527 - DNA, 50 bp, Artificial Sequence; identical to SEQ ID NO: 1525
  source: /note="Description of Artificial Sequence: Synthetic oligonucleotide"

SEQ ID NO: 1528 - DNA, 50 bp, Artificial Sequence
  source: /note="Description of Artificial Sequence: Synthetic oligonucleotide"
cttgcccccgaccgtctacgaggccgtcaccaagaacattcacgagtcct

SEQ ID NO: 1529 - DNA, 50 bp, Artificial Sequence
  source: /note="Description of Artificial Sequence: Synthetic oligonucleotide"
cctggcaggcgggaagggagggcaacggcaagccttacatctggctcatg

SEQ ID NO: 1530 - DNA, 50 bp, Artificial Sequence; identical to SEQ ID NO: 1529
  source: /note="Description of Artificial Sequence: Synthetic oligonucleotide"

SEQ ID NO: 1531 - DNA, 50 bp, Artificial Sequence
  source: /note="Description of Artificial Sequence: Synthetic oligonucleotide"
acctggccttgcccccgaccgtctacraggccgtcaccaagaacattsac

SEQ ID NO: 1532 - DNA, 50 bp, Artificial Sequence
  source: /note="Description of Artificial Sequence: Synthetic oligonucleotide"
acctggccttgcccccgaccgtctacgaggccgtcaccaagaacattcac

SEQ ID NO: 1533 - DNA, 50 bp, Artificial Sequence
  source: /note="Description of Artificial Sequence: Synthetic oligonucleotide"
ggcgggaagggagggcaacggcaagccttacatctggctcatgcaggact

SEQ ID NO: 1534 - DNA, 50 bp, Artificial Sequence
  source: /note="Description of Artificial Sequence: Synthetic oligonucleotide"
ctacctggccttgcccccgaccgtctacraggccgtcaccaagaacattg

SEQ ID NO: 1535 - DNA, 50 bp, Artificial Sequence; identical to SEQ ID NO: 1534
  source: /note="Description of Artificial Sequence: Synthetic oligonucleotide"

SEQ ID NO: 1536 - DNA, 50 bp, Artificial Sequence; identical to SEQ ID NO: 1534
  source: /note="Description of Artificial Sequence: Synthetic oligonucleotide"

SEQ ID NO: 1537 - DNA, 50 bp, Artificial Sequence
  source: /note="Description of Artificial Sequence: Synthetic oligonucleotide"
gccttacatctggctcatgcaggactcgtgaatgttcttggtgacggcct

SEQ ID NO: 1538 - DNA, 50 bp, Artificial Sequence; identical to SEQ ID NO: 1537
  source: /note="Description of Artificial Sequence: Synthetic oligonucleotide"

SEQ ID NO: 1539 - DNA, 50 bp, Artificial Sequence; identical to SEQ ID NO: 1537
  source: /note="Description of Artificial Sequence: Synthetic oligonucleotide"

SEQ ID NO: 1540 - DNA, 50 bp, Artificial Sequence
  source: /note="Description of Artificial Sequence: Synthetic oligonucleotide"
gttcttggtgacggcctcgtagacggtcgggggcaaggccaggtagaaga

SEQ ID NO: 1541 - DNA, 50 bp, Artificial Sequence; identical to SEQ ID NO: 1540
  source: /note="Description of Artificial Sequence: Synthetic oligonucleotide"

SEQ ID NO: 1542 - DNA, 50 bp, Artificial Sequence
  source: /note="Description of Artificial Sequence: Synthetic oligonucleotide"
gcctcaacagccacatgaatgccctccacctggggtcacaggccaaccgc

SEQ ID NO: 1543 - DNA, 50 bp, Artificial Sequence
  source: /note="Description of Artificial Sequence: Synthetic oligonucleotide"
agcgcctcaacagccacatgaatgccctccacctggggtcacaggccaac

SEQ ID NO: 1544 - DNA, 50 bp, Artificial Sequence; identical to SEQ ID NO: 1543
  source: /note="Description of Artificial Sequence: Synthetic oligonucleotide"

SEQ ID NO: 1545 - DNA, 50 bp, Artificial Sequence; identical to SEQ ID NO: 1543
  source: /note="Description of Artificial Sequence: Synthetic oligonucleotide"

SEQ ID NO: 1546 - DNA, 50 bp, Artificial Sequence
  source: /note="Description of Artificial Sequence: Synthetic oligonucleotide"
ccagcgcctcaacagccacatgaatgccctccacctggggtcacaggcca

SEQ ID NO: 1547 - DNA, 50 bp, Artificial Sequence; identical to SEQ ID NO: 1546
  source: /note="Description of Artificial Sequence: Synthetic oligonucleotide"

SEQ ID NO: 1548 - DNA, 50 bp, Artificial Sequence; identical to SEQ ID NO: 1546
  source: /note="Description of Artificial Sequence: Synthetic oligonucleotide"

SEQ ID NO: 1549 - DNA, 50 bp, Artificial Sequence
  source: /note="Description of Artificial Sequence: Synthetic oligonucleotide"
gtagacggtcgggggcaaggccaggtagaagargcrgktggcctgtgaca

SEQ ID NO: 1550 - DNA, 50 bp, Artificial Sequence; identical to SEQ ID NO: 1549
  source: /note="Description of Artificial Sequence: Synthetic oligonucleotide"

SEQ ID NO: 1551 - DNA, 50 bp, Artificial Sequence; identical to SEQ ID NO: 1549
  source: /note="Description of Artificial Sequence: Synthetic oligonucleotide"

SEQ ID NO: 1552 - DNA, 50 bp, Artificial Sequence
  source: /note="Description of Artificial Sequence: Synthetic oligonucleotide"
gtcgggggcaaggccaggtagaagaggcggttggcctgtgaccccaggtg

SEQ ID NO: 1553 - DNA, 50 bp, Artificial Sequence; identical to SEQ ID NO: 1552
  source: /note="Description of Artificial Sequence: Synthetic oligonucleotide"

SEQ ID NO: 1554 - DNA, 50 bp, Artificial Sequence; identical to SEQ ID NO: 1552
  source: /note="Description of Artificial Sequence: Synthetic oligonucleotide"

SEQ ID NO: 1555 - DNA, 50 bp, Artificial Sequence
  source: /note="Description of Artificial Sequence: Synthetic oligonucleotide"
cgggggcaaggccaggtagaagaggcggttggcctgtgaccccaggtgga

SEQ ID NO: 1556 - DNA, 50 bp, Artificial Sequence
  source: /note="Description of Artificial Sequence: Synthetic oligonucleotide"
gtacgatgatgcagcctcctaccagcgcctcaacagccacatgaatgccc

SEQ ID NO: 1557 - DNA, 50 bp, Artificial Sequence; identical to SEQ ID NO: 1556
  source: /note="Description of Artificial Sequence: Synthetic oligonucleotide"

SEQ ID NO: 1558 - DNA, 50 bp, Artificial Sequence
  source: /note="Description of Artificial Sequence: Synthetic oligonucleotide"
ggcaaggccaggtagaagaggcggttggcctgtgaccccaggtggaggga

SEQ ID NO: 1559 - DNA, 50 bp, Artificial Sequence
  source: /note="Description of Artificial Sequence: Synthetic oligonucleotide"
gccagtacgatgatgcagcctcctaccagcgcctcaacagccacatkrat

SEQ ID NO: 1560 - DNA, 50 bp, Artificial Sequence
  source: /note="Description of Artificial Sequence: Synthetic oligonucleotide"
ccagtacgatgatgcagcctcctaccagcgcctcaacagccacatkratt

SEQ ID NO: 1561 - DNA, 50 bp, Artificial Sequence
  source: /note="Description of Artificial Sequence: Synthetic oligonucleotide"
tggccagtacgatgatgcagcctccyaccagcgcctcaacagccacatka

SEQ ID NO: 1562 - DNA, 50 bp, Artificial Sequence
  source: /note="Description of Artificial Sequence: Synthetic oligonucleotide"
caaggccaggtagaagaggcggttggcctgtgaccccaggtggagggcat

SEQ ID NO: 1563 - DNA, 50 bp, Artificial Sequence
  source: /note="Description of Artificial Sequence: Synthetic oligonucleotide"
aaggccaggtagaagaggcggttggcctgtgaccccaggtggagggcatt

SEQ ID NO: 1564 - DNA, 50 bp, Artificial Sequence
  source: /note="Description of Artificial Sequence: Synthetic oligonucleotide"
gctggccagtacgatgatgcagcctccyaccagcgcctcaacagccacat

SEQ ID NO: 1565 - DNA, 50 bp, Artificial Sequence; identical to SEQ ID NO: 1564
  source: /note="Description of Artificial Sequence: Synthetic oligonucleotide"

SEQ ID NO: 1566 - DNA, 50 bp, Artificial Sequence; identical to SEQ ID NO: 1564
  source: /note="Description of Artificial Sequence: Synthetic oligonucleotide"

SEQ ID NO: 1567 - DNA, 50 bp, Artificial Sequence
  source: /note="Description of Artificial Sequence: Synthetic oligonucleotide"
ggcctgtgaccccaggtggagggcattcatgtggctgttgaggcgctggt

SEQ ID NO: 1568 - DNA, 50 bp, Artificial Sequence; identical to SEQ ID NO: 1567
  source: /note="Description of Artificial Sequence: Synthetic oligonucleotide"

SEQ ID NO: 1569 - DNA, 50 bp, Artificial Sequence; identical to SEQ ID NO: 1567
  source: /note="Description of Artificial Sequence: Synthetic oligonucleotide"

SEQ ID NO: 1570 - DNA, 50 bp, Artificial Sequence
  source: /note="Description of Artificial Sequence: Synthetic oligonucleotide"
tcaagctggaggacttctttgcccgcaactcctatgtggctggccagtac

SEQ ID NO: 1571 - DNA, 50 bp, Artificial Sequence; identical to SEQ ID NO: 1570
  source: /note="Description of Artificial Sequence: Synthetic oligonucleotide"

SEQ ID NO: 1572 - DNA, 50 bp, Artificial Sequence; identical to SEQ ID NO: 1570
  source: /note="Description of Artificial Sequence: Synthetic oligonucleotide"

SEQ ID NO: 1573 - DNA, 50 bp, Artificial Sequence
  source: /note="Description of Artificial Sequence: Synthetic oligonucleotide"
gtggctgttgaggcgctggtaggaggctgcatcatcgtactggccagcca

SEQ ID NO: 1574 - DNA, 50 bp, Artificial Sequence
  source: /note="Description of Artificial Sequence: Synthetic oligonucleotide"
gtggctgttgaggcgctggtaggaggctgcatcatygtactggccagcca

SEQ ID NO: 1575 - DNA, 50 bp, Artificial Sequence; identical to SEQ ID NO: 1574
  source: /note="Description of Artificial Sequence: Synthetic oligonucleotide"

SEQ ID NO: 1576 - DNA, 50 bp, Artificial Sequence; identical to SEQ ID NO: 1573
  source: /note="Description of Artificial Sequence: Synthetic oligonucleotide"

SEQ ID NO: 1577 - DNA, 50 bp, Artificial Sequence
  source: /note="Description of Artificial Sequence: Synthetic oligonucleotide"
gccaccccagaggagaagctcaagctggaggacttctttgcccrcaactg

SEQ ID NO: 1578 - DNA, 50 bp, Artificial Sequence
  source: /note="Description of Artificial Sequence: Synthetic oligonucleotide"
gttgaggcgctggtaggaggctgcatcatcgtactggccagccacatagc

SEQ ID NO: 1579 - DNA, 50 bp, Artificial Sequence
  source: /note="Description of Artificial Sequence: Synthetic oligonucleotide"
gccaccccagaggagaagctcaagctggaggacttctttgcccgcaactc

SEQ ID NO: 1580 - DNA, 50 bp, Artificial Sequence
  source: /note="Description of Artificial Sequence: Synthetic oligonucleotide"
ggcgctggtaggaggctgcatcatcgtactggccagccacataggagttg

SEQ ID NO: 1581 - DNA, 50 bp, Artificial Sequence
  source: /note="Description of Artificial Sequence: Synthetic oligonucleotide"
ctcccaggccaccccagaggagaagctcaagctggaggacttctttgccc

SEQ ID NO: 1582 - DNA, 50 bp, Artificial Sequence; identical to SEQ ID NO: 1581
  source: /note="Description of Artificial Sequence: Synthetic oligonucleotide"

SEQ ID NO: 1583 - DNA, 50 bp, Artificial Sequence
  source: /note="Description of Artificial Sequence: Synthetic oligonucleotide"
ctggccagccacataggagttgcgggcaaagaagtcctccagcttgagct

SEQ ID NO: 1584 - DNA, 50 bp, Artificial Sequence; identical to SEQ ID NO: 1583
  source: /note="Description of Artificial Sequence: Synthetic oligonucleotide"

SEQ ID NO: 1585 - DNA, 50 bp, Artificial Sequence; identical to SEQ ID NO: 1583
  source: /note="Description of Artificial Sequence: Synthetic oligonucleotide"

SEQ ID NO: 1586 - DNA, 50 bp, Artificial Sequence
  source: /note="Description of Artificial Sequence: Synthetic oligonucleotide"
cacataggagttgcgggcaaagaagtcctccagcttgagcttctcctctg

SEQ ID NO: 1587 - DNA, 50 bp, Artificial Sequence; identical to SEQ ID NO: 1586
  source: /note="Description of Artificial Sequence: Synthetic oligonucleotide"

SEQ ID NO: 1588 - DNA, 50 bp, Artificial Sequence; identical to SEQ ID NO: 1586
  source: /note="Description of Artificial Sequence: Synthetic oligonucleotide"

SEQ ID NO: 1589 - DNA, 50 bp, Artificial Sequence
  source: /note="Description of Artificial Sequence: Synthetic oligonucleotide"
tgggggaggccctgacaccacccaccttgaagaagggctcactctgtttg

SEQ ID NO: 1590 - DNA, 50 bp, Artificial Sequence; identical to SEQ ID NO: 1589
  source: /note="Description of Artificial Sequence: Synthetic oligonucleotide"

SEQ ID NO: 1591 - DNA, 50 bp, Artificial Sequence; identical to SEQ ID NO: 1589
  source: /note="Description of Artificial Sequence: Synthetic oligonucleotide"

SEQ ID NO: 1592 - DNA, 50 bp, Artificial Sequence
  source: /note="Description of Artificial Sequence: Synthetic oligonucleotide"
acaccttcatcgtgggctatgcccgttcccgcctcacagtggctgacatc

SEQ ID NO: 1593 - DNA, 50 bp, Artificial Sequence
  source: /note="Description of Artificial Sequence: Synthetic oligonucleotide"
gggggaggccctgacaccacccaccttgaagaagggctcactctgtttgc

SEQ ID NO: 1594 - DNA, 50 bp, Artificial Sequence; identical to SEQ ID NO: 1592
  source: /note="Description of Artificial Sequence: Synthetic oligonucleotide"

SEQ ID NO: 1595 - DNA, 50 bp, Artificial Sequence
  source: /note="Description of Artificial Sequence: Synthetic oligonucleotide"
cacccaccttgaagaagggctcactctgtttgcggatgtcagccactgtg

SEQ ID NO: 1596 - DNA, 50 bp, Artificial Sequence; identical to SEQ ID NO: 1595
  source: /note="Description of Artificial Sequence: Synthetic oligonucleotide"

SEQ ID NO: 1597 - DNA, 50 bp, Artificial Sequence; identical to SEQ ID NO: 1595
  source: /note="Description of Artificial Sequence: Synthetic oligonucleotide"

SEQ ID NO: 1598 - DNA, 50 bp, Artificial Sequence
  source: /note="Description of Artificial Sequence: Synthetic oligonucleotide"
gtggctgttccgggatggccttctgcccgaaaacaccttcatcgtgggct

SEQ ID NO: 1599 - DNA, 50 bp, Artificial Sequence; identical to SEQ ID NO: 1598
  source: /note="Description of Artificial Sequence: Synthetic oligonucleotide"

SEQ ID NO: 1600 - DNA, 50 bp, Artificial Sequence
  source: /note="Description of Artificial Sequence: Synthetic oligonucleotide"
agggctcactctgtttgcggatgtcagccactgtgaggcgggaacgggca

SEQ ID NO: 1601 - DNA, 50 bp, Artificial Sequence
  source: /note="Description of Artificial Sequence: Synthetic oligonucleotide"
gggctcactctgtttgcggatgtcagccactgtgaggcgggaacgggcat

SEQ ID NO: 1602 - DNA, 50 bp, Artificial Sequence
  source: /note="Description of Artificial Sequence: Synthetic oligonucleotide"
ggtggctgttccgggatggccttctgcccgaaaacaccttcatcgtgggc

SEQ ID NO: 1603 - DNA, 50 bp, Artificial Sequence; identical to SEQ ID NO: 1601
  source: /note="Description of Artificial Sequence: Synthetic oligonucleotide"

SEQ ID NO: 1604 - DNA, 50 bp, Artificial Sequence
  source: /note="Description of Artificial Sequence: Synthetic oligonucleotide"
actctgtttgcggatgtcagccactgtgaggcgggaacgggcatagccca

SEQ ID NO: 1605 - DNA, 50 bp, Artificial Sequence; identical to SEQ ID NO: 1604
  source: /note="Description of Artificial Sequence: Synthetic oligonucleotide"

SEQ ID NO: 1606 - DNA, 50 bp, Artificial Sequence
  source: /note="Description of Artificial Sequence: Synthetic oligonucleotide"
ccctcaggtggctgttccgggatggccttctgcccgaaaacaccttcatc

SEQ ID NO: 1607 - DNA, 50 bp, Artificial Sequence
  source: /note="Description of Artificial Sequence: Synthetic oligonucleotide"
ttgcggatgtcagccactgtgaggcgggaacgggcayrgcccaygatgaa

SEQ ID NO: 1608 - DNA, 50 bp, Artificial Sequence
  source: /note="Description of Artificial Sequence: Synthetic oligonucleotide"
ttgcggatgtcagccactgtgaggcgggaacgggcatagcccacgatgaa

SEQ ID NO: 1609 - DNA, 50 bp, Artificial Sequence; identical to SEQ ID NO: 1608
  source: /note="Description of Artificial Sequence: Synthetic oligonucleotide"

SEQ ID NO: 1610 - DNA, 50 bp, Artificial Sequence
  source: /note="Description of Artificial Sequence: Synthetic oligonucleotide"
agccactgtgaggcgggaacgggcatagcccacgatgaaggtgttttcga

SEQ ID NO: 1611 - DNA, 50 bp, Artificial Sequence; identical to SEQ ID NO: 1610
  source: /note="Description of Artificial Sequence: Synthetic oligonucleotide"

SEQ ID NO: 1612 - DNA, 50 bp, Artificial Sequence; identical to SEQ ID NO: 1610
  source: /note="Description of Artificial Sequence: Synthetic oligonucleotide"

SEQ ID NO: 1613 - DNA, 50 bp, Artificial Sequence; identical to SEQ ID NO: 1610
  source: /note="Description of Artificial Sequence: Synthetic oligonucleotide"

SEQ ID NO: 1614 - DNA, 50 bp, Artificial Sequence
  source: /note="Description of Artificial Sequence: Synthetic oligonucleotide"
actgtgaggcgggaacgggcatagcccacgatgaaggtgttttcgggcag

SEQ ID NO: 1615 - DNA, 50 bp, Artificial Sequence; identical to SEQ ID NO: 1614
  source: /note="Description of Artificial Sequence: Synthetic oligonucleotide"

SEQ ID NO: 1616 - DNA, 50 bp, Artificial Sequence; identical to SEQ ID NO: 1614
  source: /note="Description of Artificial Sequence: Synthetic oligonucleotide"

SEQ ID NO: 1617 - DNA, 50 bp, Artificial Sequence
  source: /note="Description of Artificial Sequence: Synthetic oligonucleotide"
ctgtgaggcgggaacgggcatagcccacgatgaaggtgttttcgggcaga

SEQ ID NO: 1618 - DNA, 50 bp, Artificial Sequence; identical to SEQ ID NO: 1617
  source: /note="Description of Artificial Sequence: Synthetic oligonucleotide"

SEQ ID NO: 1619 - DNA, 50 bp, Artificial Sequence
  source: /note="Description of Artificial Sequence: Synthetic oligonucleotide"
gcactggttacagctgtgccctgccctcaggtggctgttcyrgratggcc

SEQ ID NO: 1620 - DNA, 50 bp, Artificial Sequence
  source: /note="Description of Artificial Sequence: Synthetic oligonucleotide"
gcgggaacgggcatagcccacgatgaaggtgttttcgggcagaaggccat

SEQ ID NO: 1621 - DNA, 50 bp, Artificial Sequence
  source: /note="Description of Artificial Sequence: Synthetic oligonucleotide"
gcgggaacgggcatagcccacgatgawggtgttttcgdgcagarggccat

SEQ ID NO: 1622 - DNA, 50 bp, Artificial Sequence; identical to SEQ ID NO: 1620
  source: /note="Description of Artificial Sequence: Synthetic oligonucleotide"

SEQ ID NO: 1623 - DNA, 50 bp, Artificial Sequence; identical to SEQ ID NO: 1620
  source: /note="Description of Artificial Sequence: Synthetic oligonucleotide"

SEQ ID NO: 1624 - DNA, 50 bp, Artificial Sequence
  source: /note="Description of Artificial Sequence: Synthetic oligonucleotide"
gggaacgggcatagcccacgatgaaggtgttttcgggcagaaggccatcc

SEQ ID NO: 1625 - DNA, 50 bp, Artificial Sequence
  source: /note="Description of Artificial Sequence: Synthetic oligonucleotide"
gggaacgggcatagcccacgatgaaggtgttttcgdgcagarggccatyc

SEQ ID NO: 1626 - DNA, 50 bp, Artificial Sequence; identical to SEQ ID NO: 1624
  source: /note="Description of Artificial Sequence: Synthetic oligonucleotide"

SEQ ID NO: 1627 - DNA, 50 bp, Artificial Sequence
  source: /note="Description of Artificial Sequence: Synthetic oligonucleotide"
ggaacgggcatagcccacgatgaaggtgttttcgggcagaaggccatccc

SEQ ID NO: 1628 - DNA, 50 bp, Artificial Sequence; identical to SEQ ID NO: 1627
  source: /note="Description of Artificial Sequence: Synthetic oligonucleotide"

SEQ ID NO: 1629 - DNA, 50 bp, Artificial Sequence; identical to SEQ ID NO: 1627
  source: /note="Description of Artificial Sequence: Synthetic oligonucleotide"

SEQ ID NO: 1630 - DNA, 50 bp, Artificial Sequence
  source: /note="Description of Artificial Sequence: Synthetic oligonucleotide"
agcccacgatgaaggtgttttcgggcagaaggccatycyrgaacagccac

SEQ ID NO: 1631 - DNA, 50 bp, Artificial Sequence; identical to SEQ ID NO: 1630
  source: /note="Description of Artificial Sequence: Synthetic oligonucleotide"

SEQ ID NO: 1632 - DNA, 50 bp, Artificial Sequence
  source: /note="Description of Artificial Sequence: Synthetic oligonucleotide"
agcccacgatgaaggtgttttcgggcagaaggccatcccggaacagccac

SEQ ID NO: 1633 - DNA, 50 bp, Artificial Sequence
  source: /note="Description of Artificial Sequence: Synthetic oligonucleotide"
cacacctgttccctctgccacagggtgacctggccaagaagaagatctac

SEQ ID NO: 1634 - DNA, 50 bp, Artificial Sequence
  source: /note="Description of Artificial Sequence: Synthetic oligonucleotide"
cacacctgttccctctgccacagggtgacctgrscaagaagaagayctac

SEQ ID NO: 1635 - DNA, 50 bp, Artificial Sequence
  source: /note="Description of Artificial Sequence: Synthetic oligonucleotide"
acacctgttccctctgccacagggtgacctggccaagaagaagatctact

SEQ ID NO: 1636 - DNA, 50 bp, Artificial Sequence
  source: /note="Description of Artificial Sequence: Synthetic oligonucleotide"
gggaggtcacaggggcagtggtgggacacacttaccagatggtggggtag

SEQ ID NO: 1637 - DNA, 50 bp, Artificial Sequence
  source: /note="Description of Artificial Sequence: Synthetic oligonucleotide"
gggaggtcacaggggcagtggtgggacacacttaccagatggtggrgtag

SEQ ID NO: 1638 - DNA, 50 bp, Artificial Sequence; identical to SEQ ID NO: 1637
  source: /note="Description of Artificial Sequence: Synthetic oligonucleotide"

SEQ ID NO: 1639 - DNA, 50 bp, Artificial Sequence
  source: /note="Description of Artificial Sequence: Synthetic oligonucleotide"
cagccacttctaaccacacacctgttccctctgccacagggtgacctggg

SEQ ID NO: 1640 - DNA, 50 bp, Artificial Sequence
  source: /note="Description of Artificial Sequence: Synthetic oligonucleotide"
gcagtggtgggacacacttaccagatggtggggtagatcttcttcttggt

SEQ ID NO: 1641 - DNA, 50 bp, Artificial Sequence
  source: /note="Description of Artificial Sequence: Synthetic oligonucleotide"
gcagtggtgggacacacttaccagatggtggrgtagrtcttcttcttggt

SEQ ID NO: 1642 - DNA, 50 bp, Artificial Sequence
  source: /note="Description of Artificial Sequence: Synthetic oligonucleotide"
ccagccacttctaaccacacacctgttccctctgccacagggtgacctga

SEQ ID NO: 1643 - DNA, 50 bp, Artificial Sequence
  source: /note="Description of Artificial Sequence: Synthetic oligonucleotide"
acttcctggcttttaagattggggcctgggagatactcaccgatgcaccc

SEQ ID NO: 1644 - DNA, 50 bp, Artificial Sequence; identical to SEQ ID NO: 1643
  source: /note="Description of Artificial Sequence: Synthetic oligonucleotide"

SEQ ID NO: 1645 - DNA, 50 bp, Artificial Sequence; identical to SEQ ID NO: 1643
  source: /note="Description of Artificial Sequence: Synthetic oligonucleotide"

SEQ ID NO: 1646 - DNA, 50 bp, Artificial Sequence
  source: /note="Description of Artificial Sequence: Synthetic oligonucleotide"
cttttaagattggggcctgggagatactcaccgatgcacccrtgatgatg

SEQ ID NO: 1647 - DNA, 50 bp, Artificial Sequence; identical to SEQ ID NO: 1646
  source: /note="Description of Artificial Sequence: Synthetic oligonucleotide"

SEQ ID NO: 1648 - DNA, 50 bp, Artificial Sequence
  source: /note="Description of Artificial Sequence: Synthetic oligonucleotide"
cttttaagattggggcctgggagatactcaccgatgcacccatgatgatg

SEQ ID NO: 1649 - DNA, 50 bp, Artificial Sequence
  source: /note="Description of Artificial Sequence: Synthetic oligonucleotide"
cgggaagagcttttccagggcgatgccttccatcagtcggatacacacat

SEQ ID NO: 1650 - DNA, 50 bp, Artificial Sequence; identical to SEQ ID NO: 1649
  source: /note="Description of Artificial Sequence: Synthetic oligonucleotide"

SEQ ID NO: 1651 - DNA, 50 bp, Artificial Sequence; identical to SEQ ID NO: 1649
  source: /note="Description of Artificial Sequence: Synthetic oligonucleotide"

SEQ ID NO: 1652 - DNA, 50 bp, Artificial Sequence
  source: /note="Description of Artificial Sequence: Synthetic oligonucleotide"
cctgcgggaagagcttttccagggcgatgccttccatcagtcggatacac

SEQ ID NO: 1653 - DNA, 50 bp, Artificial Sequence; identical to SEQ ID NO: 1652
  source: /note="Description of Artificial Sequence: Synthetic oligonucleotide"

SEQ ID NO: 1654 - DNA, 50 bp, Artificial Sequence; identical to SEQ ID NO: 1652
  source: /note="Description of Artificial Sequence: Synthetic oligonucleotide"

SEQ ID NO: 1655 - DNA, 50 bp, Artificial Sequence
  source: /note="Description of Artificial Sequence: Synthetic oligonucleotide"
atccgactgatggaaggcatcgccctggaaaagctcttcccgcaggatcc

SEQ ID NO: 1656 - DNA, 50 bp, Artificial Sequence; identical to SEQ ID NO: 1655
  source: /note="Description of Artificial Sequence: Synthetic oligonucleotide"

SEQ ID NO: 1657 - DNA, 50 bp, Artificial Sequence; identical to SEQ ID NO: 1655
  source: /note="Description of Artificial Sequence: Synthetic oligonucleotide"

SEQ ID NO: 1658 - DNA, 50 bp, Artificial Sequence
  source: /note="Description of Artificial Sequence: Synthetic oligonucleotide"
ttccaccagacagcgtcatggcagagcaggtggccctgagccggacccag

SEQ ID NO: 1659 - DNA, 50 bp, Artificial Sequence
  source: /note="Description of Artificial Sequence: Synthetic oligonucleotide"
ttccaccagacagcgtcatggcagagcaggtggccctgagcyggacccag

SEQ ID NO: 1660 - DNA, 50 bp, Artificial Sequence; identical to SEQ ID NO: 1658
  source: /note="Description of Artificial Sequence: Synthetic oligonucleotide"

SEQ ID NO: 1661 - DNA, 50 bp, Artificial Sequence
  source: /note="Description of Artificial Sequence: Synthetic oligonucleotide"
ggcatcgccctggaaaagctcttcccgcaggatcccgcacacctgggtcc

SEQ ID NO: 1662 - DNA, 50 bp, Artificial Sequence
  source: /note="Description of Artificial Sequence: Synthetic oligonucleotide"
ggcatcgccctggaaaagctcttcccgcaggatccygcacamctgggtcc

SEQ ID NO: 1663 - DNA, 50 bp, Artificial Sequence
  source: /note="Description of Artificial Sequence: Synthetic oligonucleotide"
gcatcgccctggaaaagctcttcccgcaggatccygcacamctgggtcca

SEQ ID NO: 1664 - DNA, 50 bp, Artificial Sequence
  source: /note="Description of Artificial Sequence: Synthetic oligonucleotide"
gagggaggggcctcttggtgctgacctgtcctgttgtatgtgtcacagcg

SEQ ID NO: 1665 - DNA, 50 bp, Artificial Sequence; identical to SEQ ID NO: 1664
  source: /note="Description of Artificial Sequence: Synthetic oligonucleotide"

SEQ ID NO: 1666 - DNA, 50 bp, Artificial Sequence; identical to SEQ ID NO: 1664
  source: /note="Description of Artificial Sequence: Synthetic oligonucleotide"

SEQ ID NO: 1667 - DNA, 50 bp, Artificial Sequence
  source: /note="Description of Artificial Sequence: Synthetic oligonucleotide"
atcattacaggtcatgtagcatttaccacagttgatacacatttcttcat

SEQ ID NO: 1668 - DNA, 50 bp, Artificial Sequence
  source: /note="Description of Artificial Sequence: Synthetic oligonucleotide"
ggaacatttggtgaattgagcaacgtagagcaagttgtggctatgattga

SEQ ID NO: 1669 - DNA, 50 bp, Artificial Sequence
  source: /note="Description of Artificial Sequence: Synthetic oligonucleotide"
atattggtgtcaaagtgtcactgaactaaaggctgactttccagacaacg

SEQ ID NO: 1670 - DNA, 50 bp, Artificial Sequence
  source: /note="Description of Artificial Sequence: Synthetic oligonucleotide"
ttcaccaacttatgccaattctcttgttttagatgttaaatcacacttac

SEQ ID NO: 1671 - DNA, 50 bp, Artificial Sequence
  source: /note="Description of Artificial Sequence: Synthetic oligonucleotide"
gaaagttttggtgagggcaaaaccccatccagcttcaaaagctcttcgac

SEQ ID NO: 1672 - DNA, 50 bp, Artificial Sequence; identical to SEQ ID NO: 1671
  source: /note="Description of Artificial Sequence: Synthetic oligonucleotide"

SEQ ID NO: 1673 - DNA, 50 bp, Artificial Sequence
  source: /note="Description of Artificial Sequence: Synthetic oligonucleotide"
aatccttttggtcttgctagcgcaactccagccaccagcacatcaatgag

SEQ ID NO: 1674 - DNA, 50 bp, Artificial Sequence; identical to SEQ ID NO: 1668
  source: /note="Description of Artificial Sequence: Synthetic oligonucleotide"

SEQ ID NO: 1675 - DNA, 50 bp, Artificial Sequence
  source: /note="Description of Artificial Sequence: Synthetic oligonucleotide"
tcatgtttgcttctcctttcaatctggagacagagctctgggagaggaat

SEQ ID NO: 1676 - DNA, 50 bp, Artificial Sequence; identical to SEQ ID NO: 1675
  source: /note="Description of Artificial Sequence: Synthetic oligonucleotide"

SEQ ID NO: 1677 - DNA, 50 bp, Artificial Sequence; identical to SEQ ID NO: 1675
  source: /note="Description of Artificial Sequence: Synthetic oligonucleotide"

SEQ ID NO: 1678 - DNA, 50 bp, Artificial Sequence
  source: /note="Description of Artificial Sequence: Synthetic oligonucleotide"
ggtggtgctgcatggatatgaagtggtgaaggaagccctgattgatcttc

SEQ ID NO: 1679 - DNA, 50 bp, Artificial Sequence; identical to SEQ ID NO: 1678
  source: /note="Description of Artificial Sequence: Synthetic oligonucleotide"

SEQ ID NO: 1680 - DNA, 50 bp, Artificial Sequence
  source: /note="Description of Artificial Sequence: Synthetic oligonucleotide"
ttagctctttcagccagtgggaaatggcctcttccagaaaactcctctcg

SEQ ID NO: 1681 - DNA, 50 bp, Artificial Sequence
  source: /note="Description of Artificial Sequence: Synthetic oligonucleotide"
aacaaccctcgggactttattgattgcttcctgatcaaaatggagaaggt

SEQ ID NO: 1682 - DNA, 50 bp, Artificial Sequence; identical to SEQ ID NO: 1681
  source: /note="Description of Artificial Sequence: Synthetic oligonucleotide"

SEQ ID NO: 1683 - DNA, 50 bp, Artificial Sequence
  source: /note="Description of Artificial Sequence: Synthetic oligonucleotide"
tcttacttgtgtcttgtcagctaaagtccaggaagagattgaacgtgtyg

SEQ ID NO: 1684 - DNA, 50 bp, Artificial Sequence; identical to SEQ ID NO: 1683
  source: /note="Description of Artificial Sequence: Synthetic oligonucleotide"

SEQ ID NO: 1685 - DNA, 50 bp, Artificial Sequence
  source: /note="Description of Artificial Sequence: Synthetic oligonucleotide"
gcttccttcactgcttcatatccatgcagcaccactatgggtttcaggcg

SEQ ID NO: 1686 - DNA, 50 bp, Artificial Sequence
  source: /note="Description of Artificial Sequence: Synthetic oligonucleotide"
gcttccttcactgcttcatatccatgcagyaycactatgggtttcaggcg

SEQ ID NO: 1687 - DNA, 50 bp, Artificial Sequence; identical to SEQ ID NO: 1686
  source: /note="Description of Artificial Sequence: Synthetic oligonucleotide"

SEQ ID NO: 1688 - DNA, 50 bp, Artificial Sequence
  source: /note="Description of Artificial Sequence: Synthetic oligonucleotide"
tctccaagatcaatcagggcttccttcactgcttcatatccatgcagcac

SEQ ID NO: 1689 - DNA, 50 bp, Artificial Sequence
  source: /note="Description of Artificial Sequence: Synthetic oligonucleotide"
tctccaagatcaatcagggcttccttcactgcttcatatccatgcagyac

SEQ ID NO: 1690 - DNA, 50 bp, Artificial Sequence
  source: /note="Description of Artificial Sequence: Synthetic oligonucleotide"
cctaccaaatcctctgttagctctttcagccagtgggaaaatgmctcttc

SEQ ID NO: 1691 - DNA, 50 bp, Artificial Sequence; identical to SEQ ID NO: 1690
  source: /note="Description of Artificial Sequence: Synthetic oligonucleotide"

SEQ ID NO: 1692 - DNA, 50 bp, Artificial Sequence
  source: /note="Description of Artificial Sequence: Synthetic oligonucleotide"
cctaccaaatcctctgttagctctttcagccagtgggaaaatgcctcttc

SEQ ID NO: 1693 - DNA, 50 bp, Artificial Sequence
  source: /note="Description of Artificial Sequence: Synthetic oligonucleotide"
tgcacacctaccaaatcctctgttagctctttcagccagtgggaaaatgc

SEQ ID NO: 1694 - DNA, 50 bp, Artificial Sequence; identical to SEQ ID NO: 1693
  source: /note="Description of Artificial Sequence: Synthetic oligonucleotide"

SEQ ID NO: 1695 - DNA, 50 bp, Artificial Sequence; identical to SEQ ID NO: 1693
  source: /note="Description of Artificial Sequence: Synthetic oligonucleotide"

SEQ ID NO: 1696 - DNA, 50 bp, Artificial Sequence; identical to SEQ ID NO: 149
  source: /note="Description of Artificial Sequence: Synthetic oligonucleotide"

SEQ ID NO: 1697 - DNA, 50 bp, Artificial Sequence
  source: /note="Description of Artificial Sequence: Synthetic oligonucleotide"
ttcctgttaggaattgttttcagcaatggaaagaaatggaaggagatccg

SEQ ID NO: 1698 - DNA, 50 bp, Artificial Sequence; identical to SEQ ID NO: 1697
  source: /note="Description of Artificial Sequence: Synthetic oligonucleotide"

SEQ ID NO: 1699 - DNA, 50 bp, Artificial Sequence; identical to SEQ ID NO: 1697
  source: /note="Description of Artificial Sequence: Synthetic oligonucleotide"

SEQ ID NO: 1700 - DNA, 50 bp, Artificial Sequence
  source: /note="Description of Artificial Sequence: Synthetic oligonucleotide"
ttcagcaatggaaagaaatggaaggagatccggcgtttctccctcatgag

SEQ ID NO: 1701 - DNA, 50 bp, Artificial Sequence
  source: /note="Description of Artificial Sequence: Synthetic oligonucleotide"
ttgaacacggtcctcaatgctcctcttccccatcccaaaattccgcagcg

SEQ ID NO: 1702 - DNA, 50 bp, Artificial Sequence
  source: /note="Description of Artificial Sequence: Synthetic oligonucleotide"
tttgggatggggaagaggagcattgaggaccgtgttcaagaggaagcccg

SEQ ID NO: 1703 - DNA, 50 bp, Artificial Sequence; identical to SEQ ID NO: 1702
  source: /note="Description of Artificial Sequence: Synthetic oligonucleotide"

SEQ ID NO: 1704 - DNA, 50 bp, Artificial Sequence
  source: /note="Description of Artificial Sequence: Synthetic oligonucleotide"
tatatctaaagtttaatagtattttaaattgtttctaattatttagcctc

SEQ ID NO: 1705 - DNA, 50 bp, Artificial Sequence; identical to SEQ ID NO: 1704
  source: /note="Description of Artificial Sequence: Synthetic oligonucleotide"

SEQ ID NO: 1706 - DNA, 50 bp, Artificial Sequence; identical to SEQ ID NO: 1704
  source: /note="Description of Artificial Sequence: Synthetic oligonucleotide"

SEQ ID NO: 1707 - DNA, 50 bp, Artificial Sequence
  source: /note="Description of Artificial Sequence: Synthetic oligonucleotide"
tgattataaagatcagcaatttcttaacttaatggaaaagttgaatgaac

SEQ ID NO: 1708 - DNA, 50 bp, Artificial Sequence; identical to SEQ ID NO: 1707
  source: /note="Description of Artificial Sequence: Synthetic oligonucleotide"

SEQ ID NO: 1709 - DNA, 50 bp, Artificial Sequence
  source: /note="Description of Artificial Sequence: Synthetic oligonucleotide"
atggaaaagttgaatgaaaacatcaagattttgagcagcccctggatcct

SEQ ID NO: 1710 - DNA, 50 bp, Artificial Sequence
  source: /note="Description of Artificial Sequence: Synthetic oligonucleotide"
atggaaaagttgaatgaaaacatcaagaytttgagcagcccctggatcct

SEQ ID NO: 1711 - DNA, 50 bp, Artificial Sequence; identical to SEQ ID NO: 1709
  source: /note="Description of Artificial Sequence: Synthetic oligonucleotide"

SEQ ID NO: 1712 - DNA, 50 bp, Artificial Sequence
  source: /note="Description of Artificial Sequence: Synthetic oligonucleotide"
aatttaataaattattgttttctcttagatctgcaataatttttctcctg

SEQ ID NO: 1713 - DNA, 50 bp, Artificial Sequence; identical to SEQ ID NO: 1712
  source: /note="Description of Artificial Sequence: Synthetic oligonucleotide"

SEQ ID NO: 1714 - DNA, 50 bp, Artificial Sequence
  source: /note="Description of Artificial Sequence: Synthetic oligonucleotide"
tgttttctcttagatctgcaataatttttctcctatcattgattacttcc

SEQ ID NO: 1715 - DNA, 50 bp, Artificial Sequence; identical to SEQ ID NO: 1714
  source: /note="Description of Artificial Sequence: Synthetic oligonucleotide"

SEQ ID NO: 1716 - DNA, 50 bp, Artificial Sequence
  source: /note="Description of Artificial Sequence: Synthetic oligonucleotide"
cttcagcaggagaaggagagcatatytcagggttgtgcttgtcgtctctc

SEQ ID NO: 1717 - DNA, 50 bp, Artificial Sequence
  source: /note="Description of Artificial Sequence: Synthetic oligonucleotide"
cttcagcaggagaaggagagcatatctcagggttgtgcttgtcgtctctc

SEQ ID NO: 1718 - DNA, 50 bp, Artificial Sequence; identical to SEQ ID NO: 1717
  source: /note="Description of Artificial Sequence: Synthetic oligonucleotide"

SEQ ID NO: 1719 - DNA, 50 bp, Artificial Sequence
  source: /note="Description of Artificial Sequence: Synthetic oligonucleotide"
ttctgaaaattaattaacttatcatctctgatcatacctgtgacctctgg

SEQ ID NO: 1720 - DNA, 50 bp, Artificial Sequence; identical to SEQ ID NO: 1719
  source: /note="Description of Artificial Sequence: Synthetic oligonucleotide"

SEQ ID NO: 1721 - DNA, 50 bp, Artificial Sequence
  source: /note="Description of Artificial Sequence: Synthetic oligonucleotide"
gctcctgtcttgcatgcaggggctccggtttctgccaatcacacgttcag

SEQ ID NO: 1722 - DNA, 50 bp, Artificial Sequence; identical to SEQ ID NO: 1721
  source: /note="Description of Artificial Sequence: Synthetic oligonucleotide"

SEQ ID NO: 1723 - DNA, 50 bp, Artificial Sequence
  source: /note="Description of Artificial Sequence: Synthetic oligonucleotide"
ttgaacgtgtgattggcagaaaccggagcccctgcatgcaagacaggagc

SEQ ID NO: 1724 - DNA, 50 bp, Artificial Sequence
  source: /note="Description of Artificial Sequence: Synthetic oligonucleotide"
actgcatggggcaggctggtggggagaaggtcaatgtatctctggacctc

SEQ ID NO: 1725 - DNA, 50 bp, Artificial Sequence
  source: /note="Description of Artificial Sequence: Synthetic oligonucleotide"
ttaatgtcacaggtcactgcatggggcaggctggtggggagaaggtcaag

SEQ ID NO: 1726 - DNA, 50 bp, Artificial Sequence; identical to SEQ ID NO: 1725
  source: /note="Description of Artificial Sequence: Synthetic oligonucleotide"

SEQ ID NO: 1727 - DNA, 50 bp, Artificial Sequence; identical to SEQ ID NO: 1725
  source: /note="Description of Artificial Sequence: Synthetic oligonucleotide"

SEQ ID NO: 1728 - DNA, 50 bp, Artificial Sequence
  source: /note="Description of Artificial Sequence: Synthetic oligonucleotide"
agccacatgccctacacagatgctgtggtgcacgaggtccagagatacac

SEQ ID NO: 1729 - DNA, 50 bp, Artificial Sequence
  source: /note="Description of Artificial Sequence: Synthetic oligonucleotide"
acatgccctattcagatgctgtagtgcacgaggtccagagatacattgag

SEQ ID NO: 1730 - DNA, 50 bp, Artificial Sequence
  source: /note="Description of Artificial Sequence: Synthetic oligonucleotide"
tgaatttaatgtcacaggtcacggcatagagcaggctggtggggagaagc

SEQ ID NO: 1731 - DNA, 50 bp, Artificial Sequence
  source: /note="Description of Artificial Sequence: Synthetic oligonucleotide"
tgaatttaatgtcacaggtcactgcatggggcaggctggtggggagaakc

SEQ ID NO: 1732 - DNA, 50 bp, Artificial Sequence
  source: /note="Description of Artificial Sequence: Synthetic oligonucleotide"
ctgaatttaatgtcacaggtcactgcatggggcaggctggtggggagaag

SEQ ID NO: 1733 - DNA, 50 bp, Artificial Sequence
  source: /note="Description of Artificial Sequence: Synthetic oligonucleotide"
cctgccccatgcagtgacctgtgacattaaattcagaaactatctcattc

SEQ ID NO: 1734 - DNA, 50 bp, Artificial Sequence; identical to SEQ ID NO: 1733
  source: /note="Description of Artificial Sequence: Synthetic oligonucleotide"

SEQ ID NO: 1735 - DNA, 50 bp, Artificial Sequence
  source: /note="Description of Artificial Sequence: Synthetic oligonucleotide"
tgtttctagggcacaaccatattaatttccctgacttctgtgctacatgc

SEQ ID NO: 1736 - DNA, 50 bp, Artificial Sequence; identical to SEQ ID NO: 1735
  source: /note="Description of Artificial Sequence: Synthetic oligonucleotide"

SEQ ID NO: 1737 - DNA, 50 bp, Artificial Sequence
  source: /note="Description of Artificial Sequence: Synthetic oligonucleotide"
acgcatgaggagtaactgctctctgtgtttgctattttcaggaaaacgga

SEQ ID NO: 1738 - DNA, 50 bp, Artificial Sequence; identical to SEQ ID NO: 1737
  source: /note="Description of Artificial Sequence: Synthetic oligonucleotide"

SEQ ID NO: 1739 - DNA, 50 bp, Artificial Sequence; identical to SEQ ID NO: 1737
  source: /note="Description of Artificial Sequence: Synthetic oligonucleotide"

SEQ ID NO: 1740 - DNA, 50 bp, Artificial Sequence
  source: /note="Description of Artificial Sequence: Synthetic oligonucleotide"
aagccctggccggcatggagctgtttttattcctgacctccattttacag

SEQ ID NO: 1741 - DNA, 50 bp, Artificial Sequence; identical to SEQ ID NO: 1740
  source: /note="Description of Artificial Sequence: Synthetic oligonucleotide"

SEQ ID NO: 1742 - DNA, 50 bp, Artificial Sequence; identical to SEQ ID NO: 1740
  source: /note="Description of Artificial Sequence: Synthetic oligonucleotide"

SEQ ID NO: 1743 - DNA, 50 bp, Artificial Sequence
  source: /note="Description of Artificial Sequence: Synthetic oligonucleotide"
gacaactggagtggtgtcaaggttctttgggtcaaccagagatttcaggc

SEQ ID NO: 1744 - DNA, 50 bp, Artificial Sequence
  source: /note="Description of Artificial Sequence: Synthetic oligonucleotide"
tccattttacagaactttaacctgaaatctctggttgacccaaagaaccc

SEQ ID NO: 1745 - DNA, 50 bp, Artificial Sequence; identical to SEQ ID NO: 1744
  source: /note="Description of Artificial Sequence: Synthetic oligonucleotide"

SEQ ID NO: 1746 - DNA, 50 bp, Artificial Sequence
  source: /note="Description of Artificial Sequence: Synthetic oligonucleotide"
agctgcagggactgcacagcagcagccaggccatctgctcttcttcagac

SEQ ID NO: 1747 - DNA, 50 bp, Artificial Sequence; identical to SEQ ID NO: 1702
  source: /note="Description of Artificial Sequence: Synthetic oligonucleotide"

SEQ ID NO: 1748 - DNA, 50 bp, Artificial Sequence
  source: /note="Description of Artificial Sequence: Synthetic oligonucleotide"
caggtagcgctcggaggagacactgacaaggatgatgtcatccccaacgc

SEQ ID NO: 1749 - DNA, 50 bp, Artificial Sequence; identical to SEQ ID NO: 1748
  source: /note="Description of Artificial Sequence: Synthetic oligonucleotide"

SEQ ID NO: 1750 - DNA, 50 bp, Artificial Sequence; identical to SEQ ID NO: 1748
  source: /note="Description of Artificial Sequence: Synthetic oligonucleotide"

SEQ ID NO: 1751 - DNA, 50 bp, Artificial Sequence
  source: /note="Description of Artificial Sequence: Synthetic oligonucleotide"
aacccttgacttcactctcttctgtgtccccagacttgtctactatgagg

SEQ ID NO: 1752 - DNA, 50 bp, Artificial Sequence; identical to SEQ ID NO: 1751
  source: /note="Description of Artificial Sequence: Synthetic oligonucleotide"

SEQ ID NO: 1753 - DNA, 50 bp, Artificial Sequence
  source: /note="Description of Artificial Sequence: Synthetic oligonucleotide"
agtgactccccgtacttgatctcaggggggcccatgccctccacatcccg

SEQ ID NO: 1754 - DNA, 50 bp, Artificial Sequence; identical to SEQ ID NO: 1753
  source: /note="Description of Artificial Sequence: Synthetic oligonucleotide"

SEQ ID NO: 1755 - DNA, 50 bp, Artificial Sequence; identical to SEQ ID NO: 1753
  source: /note="Description of Artificial Sequence: Synthetic oligonucleotide"

SEQ ID NO: 1756 - DNA, 50 bp, Artificial Sequence
  source: /note="Description of Artificial Sequence: Synthetic oligonucleotide"
gtgagccacagtcctgaggccacatgctgcacgaagcacagtgactcccc

SEQ ID NO: 1757 - DNA, 50 bp, Artificial Sequence; identical to SEQ ID NO: 1756
  source: /note="Description of Artificial Sequence: Synthetic oligonucleotide"

SEQ ID NO: 1758 - DNA, 50 bp, Artificial Sequence; identical to SEQ ID NO: 1756
  source: /note="Description of Artificial Sequence: Synthetic oligonucleotide"

SEQ ID NO: 1759 - DNA, 50 bp, Artificial Sequence
  source: /note="Description of Artificial Sequence: Synthetic oligonucleotide"
gctcacttgatgaactggttgtataggccattggtgctgtggatcatgcg

SEQ ID NO: 1760 - DNA, 50 bp, Artificial Sequence; identical to SEQ ID NO: 1759
  source: /note="Description of Artificial Sequence: Synthetic oligonucleotide"

SEQ ID NO: 1761 - DNA, 50 bp, Artificial Sequence; identical to SEQ ID NO: 1759
  source: /note="Description of Artificial Sequence: Synthetic oligonucleotide"

SEQ ID NO: 1762 - DNA, 50 bp, Artificial Sequence
  source: /note="Description of Artificial Sequence: Synthetic oligonucleotide"
ggcaggttgctcacttgatgaactggttgtataggccattggtgctgtgc

SEQ ID NO: 1763 - DNA, 50 bp, Artificial Sequence; identical to SEQ ID NO: 1762
  source: /note="Description of Artificial Sequence: Synthetic oligonucleotide"

SEQ ID NO: 1764 - DNA, 50 bp, Artificial Sequence
  source: /note="Description of Artificial Sequence: Synthetic oligonucleotide"
gcaggggaggaggcagccgagtcctggaaagagattgtgaatcttctctc

SEQ ID NO: 1765 - DNA, 50 bp, Artificial Sequence
  source: /note="Description of Artificial Sequence: Synthetic oligonucleotide"
tggggtgttctcaggggagtcaggactgggacccctacctaggagttcag

SEQ ID NO: 1766 - DNA, 50 bp, Artificial Sequence; identical to SEQ ID NO: 1765
  source: /note="Description of Artificial Sequence: Synthetic oligonucleotide"

SEQ ID NO: 1767 - DNA, 50 bp, Artificial Sequence
  source: /note="Description of Artificial Sequence: Synthetic oligonucleotide"
ccagtcctattggatctgacacctcttccccsctcagcttctctaatccg

SEQ ID NO: 1768 - DNA, 50 bp, Artificial Sequence
  source: /note="Description of Artificial Sequence: Synthetic oligonucleotide"
ccagtcctattggatctgacacctcttcccccctcagcttctctaatccg

SEQ ID NO: 1769 - DNA, 50 bp, Artificial Sequence; identical to SEQ ID NO: 1768
  source: /note="Description of Artificial Sequence: Synthetic oligonucleotide"

SEQ ID NO: 1770 - DNA, 50 bp, Artificial Sequence
  source: /note="Description of Artificial Sequence: Synthetic oligonucleotide"
ttgctgaccagccagtccaagtttgtggagaagagggcacagttgctayg

SEQ ID NO: 1771 - DNA, 50 bp, Artificial Sequence; identical to SEQ ID NO: 1770
  source: /note="Description of Artificial Sequence: Synthetic oligonucleotide"

SEQ ID NO: 1772 - DNA, 50 bp, Artificial Sequence
  source: /note="Description of Artificial Sequence: Synthetic oligonucleotide"
gtcctggacgtgctatgctccctgtgtgtgtgtaatggtgtggctgtacg

SEQ ID NO: 1773 - DNA, 50 bp, Artificial Sequence; identical to SEQ ID NO: 335
  source: /note="Description of Artificial Sequence: Synthetic oligonucleotide"

SEQ ID NO: 1774 - DNA, 50 bp, Artificial Sequence; identical to SEQ ID NO: 335
  source: /note="Description of Artificial Sequence: Synthetic oligonucleotide"

SEQ ID NO: 1775 - DNA, 50 bp, Artificial Sequence
  source: /note="Description of Artificial Sequence: Synthetic oligonucleotide"
tcctccgtggaagacaccatgagcctgctcgagtgcctcggccagatccg

SEQ ID NO: 1776 - DNA, 50 bp, Artificial Sequence; identical to SEQ ID NO: 1775
  source: /note="Description of Artificial Sequence: Synthetic oligonucleotide"

SEQ ID NO: 1777 - DNA, 50 bp, Artificial Sequence; identical to SEQ ID NO: 1775
  source: /note="Description of Artificial Sequence: Synthetic oligonucleotide"

SEQ ID NO: 1778 - DNA, 50 bp, Artificial Sequence
  source: /note="Description of Artificial Sequence: Synthetic oligonucleotide"
gtcttctaccaacacccgaacctgatgagggcgctgggcatgcacgagag

SEQ ID NO: 1779 - DNA, 50 bp, Artificial Sequence; identical to SEQ ID NO: 1778
  source: /note="Description of Artificial Sequence: Synthetic oligonucleotide"

SEQ ID NO: 1780 - DNA, 50 bp, Artificial Sequence
  source: /note="Description of Artificial Sequence: Synthetic oligonucleotide"
cgcagggtcctcggagatgcggatggcctcttcgatggcagccagcagcc

SEQ ID NO: 1781 - DNA, 50 bp, Artificial Sequence; identical to SEQ ID NO: 1780
  source: /note="Description of Artificial Sequence: Synthetic oligonucleotide"

SEQ ID NO: 1782 - DNA, 50 bp, Artificial Sequence
  source: /note="Description of Artificial Sequence: Synthetic oligonucleotide"
cggaagcctgagtgcttcggacccgccctgcggggtgagggtggctcagg

SEQ ID NO: 1783 - DNA, 50 bp, Artificial Sequence
  source: /note="Description of Artificial Sequence: Synthetic oligonucleotide"
ggacacgccatcatgtccttctatgccgccttgatcgacctgctcggacg

SEQ ID NO: 1784 - DNA, 50 bp, Artificial Sequence; identical to SEQ ID NO: 1783
  source: /note="Description of Artificial Sequence: Synthetic oligonucleotide"

SEQ ID NO: 1785 - DNA, 50 bp, Artificial Sequence; identical to SEQ ID NO: 1783
  source: /note="Description of Artificial Sequence: Synthetic oligonucleotide"

SEQ ID NO: 1786 - DNA, 50 bp, Artificial Sequence
  source: /note="Description of Artificial Sequence: Synthetic oligonucleotide"
ctaatccaagccggcaagggtgaggccctgcggatccgcgccatcctccg

SEQ ID NO: 1787 - DNA, 50 bp, Artificial Sequence
  source: /note="Description of Artificial Sequence: Synthetic oligonucleotide"
acgtccagcacgtgcagcaagaagtcctggttctcgatgccatacacacg

SEQ ID NO: 1788 - DNA, 50 bp, Artificial Sequence; identical to SEQ ID NO: 1787
  source: /note="Description of Artificial Sequence: Synthetic oligonucleotide"

SEQ ID NO: 1789 - DNA, 50 bp, Artificial Sequence; identical to SEQ ID NO: 1787
  source: /note="Description of Artificial Sequence: Synthetic oligonucleotide"

SEQ ID NO: 1790 - DNA, 50 bp, Artificial Sequence
  source: /note="Description of Artificial Sequence: Synthetic oligonucleotide"
acggtgtacaggtagacgaccaccgccagaaggcccacggtcatcaccag

SEQ ID NO: 1791 - DNA, 50 bp, Artificial Sequence; identical to SEQ ID NO: 1790
  source: /note="Description of Artificial Sequence: Synthetic oligonucleotide"

SEQ ID NO: 1792 - DNA, 50 bp, Artificial Sequence; identical to SEQ ID NO: 1790
  source: /note="Description of Artificial Sequence: Synthetic oligonucleotide"

SEQ ID NO: 1793 - DNA, 50 bp, Artificial Sequence; identical to SEQ ID NO: 1762
  source: /note="Description of Artificial Sequence: Synthetic oligonucleotide"

SEQ ID NO: 1794 - DNA, 50 bp, Artificial Sequence
  source: /note="Description of Artificial Sequence: Synthetic oligonucleotide"
tgcactcctcacaggactcttgctactcctggttcagcgccaccctaact

SEQ ID NO: 1795 - DNA, 50 bp, Artificial Sequence; identical to SEQ ID NO: 1794
  source: /note="Description of Artificial Sequence: Synthetic oligonucleotide"

SEQ ID NO: 1796 - DNA, 50 bp, Artificial Sequence; identical to SEQ ID NO: 1794
  source: /note="Description of Artificial Sequence: Synthetic oligonucleotide"

SEQ ID NO: 1797 - DNA, 50 bp, Artificial Sequence
  source: /note="Description of Artificial Sequence: Synthetic oligonucleotide"
cagaaggtttcccaaaaggggcagagggcggggccctggtgggaggskgc

SEQ ID NO: 1798 - DNA, 50 bp, Artificial Sequence
  source: /note="Description of Artificial Sequence: Synthetic oligonucleotide"
acaggactcttgctactcctggttcagcgccaccctaacwcycatggcac

SEQ ID NO: 1799 - DNA, 50 bp, Artificial Sequence
  source: /note="Description of Artificial Sequence: Synthetic oligonucleotide"
tgcagaaggtttcccaaaaggggcagagggcggggccctggtgggaggsg

SEQ ID NO: 1800 - DNA, 50 bp, Artificial Sequence
  source: /note="Description of Artificial Sequence: Synthetic oligonucleotide"
tgcagaaggtttcccaaaaggggcagagggcggggccctggtgggaggbg

SEQ ID NO: 1801 - DNA, 50 bp, Artificial Sequence; identical to SEQ ID NO: 1800
  source: /note="Description of Artificial Sequence: Synthetic oligonucleotide"

SEQ ID NO: 1802 - DNA, 50 bp, Artificial Sequence
  source: /note="Description of Artificial Sequence: Synthetic oligonucleotide"
acaggactcttgctactcctggttcagcgccaccctaacacccatgaccc

SEQ ID NO: 1803 - DNA, 50 bp, Artificial Sequence
  source: /note="Description of Artificial Sequence: Synthetic oligonucleotide"
ctgcagaaggtttcccaaaaggggcagagggcggggccctggtgggaggg

SEQ ID NO: 1804 - DNA, 50 bp, Artificial Sequence; identical to SEQ ID NO: 1803
  source: /note="Description of Artificial Sequence: Synthetic oligonucleotide"

SEQ ID NO: 1805 - DNA, 50 bp, Artificial Sequence
  source: /note="Description of Artificial Sequence: Synthetic oligonucleotide"
cgtctgtgtcttaccctcagaaaggatttgagtaggcctcttctatccac

SEQ ID NO: 1806 - DNA, 50 bp, Artificial Sequence; identical to SEQ ID NO: 1805
  source: /note="Description of Artificial Sequence: Synthetic oligonucleotide"

SEQ ID NO: 1807 - DNA, 50 bp, Artificial Sequence; identical to SEQ ID NO: 1805
  source: /note="Description of Artificial Sequence: Synthetic oligonucleotide"

SEQ ID NO: 1808 - DNA, 50 bp, Artificial Sequence
  source: /note="Description of Artificial Sequence: Synthetic oligonucleotide"
ctaacagccacccctggtgtggatgtgattggcagttccgagagaaatat

SEQ ID NO: 1809 - DNA, 50 bp, Artificial Sequence; identical to SEQ ID NO: 1808
  source: /note="Description of Artificial Sequence: Synthetic oligonucleotide"

SEQ ID NO: 1810 - DNA, 50 bp, Artificial Sequence; identical to SEQ ID NO: 1808
  source: /note="Description of Artificial Sequence: Synthetic oligonucleotide"

SEQ ID NO: 1811 - DNA, 50 bp, Artificial Sequence
  source: /note="Description of Artificial Sequence: Synthetic oligonucleotide"
gccttctctggccggggaaaaatcgccatggtcgacccattcttccrggg

SEQ ID NO: 1812 - DNA, 50 bp, Artificial Sequence; identical to SEQ ID NO: 1811
  source: /note="Description of Artificial Sequence: Synthetic oligonucleotide"

SEQ ID NO: 1813 - DNA, 50 bp, Artificial Sequence
  source: /note="Description of Artificial Sequence: Synthetic oligonucleotide"
ggtcacagagaatcgccgaagcaccttccagcggtttccattggcaaagg

SEQ ID NO: 1814 - DNA, 50 bp, Artificial Sequence
  source: /note="Description of Artificial Sequence: Synthetic oligonucleotide"
aggactcacccttggatttccgaagctcctctatcagacactgagcctcc

SEQ ID NO: 1815 - DNA, 50 bp, Artificial Sequence; identical to SEQ ID NO: 1814
  source: /note="Description of Artificial Sequence: Synthetic oligonucleotide"

SEQ ID NO: 1816 - DNA, 50 bp, Artificial Sequence; identical to SEQ ID NO: 1814
  source: /note="Description of Artificial Sequence: Synthetic oligonucleotide"

SEQ ID NO: 1817 - DNA, 50 bp, Artificial Sequence
  source: /note="Description of Artificial Sequence: Synthetic oligonucleotide"
tcagtctgtgtccttgacctgctgcttcttcctaggggccctcatggacg

SEQ ID NO: 1818 - DNA, 50 bp, Artificial Sequence; identical to SEQ ID NO: 1817
  source: /note="Description of Artificial Sequence: Synthetic oligonucleotide"

SEQ ID NO: 1819 - DNA, 50 bp, Artificial Sequence; identical to SEQ ID NO: 1817
  source: /note="Description of Artificial Sequence: Synthetic oligonucleotide"

SEQ ID NO: 1820 - DNA, 50 bp, Artificial Sequence
  source: /note="Description of Artificial Sequence: Synthetic oligonucleotide"
ggaatcgttttccaaagacgatggagcagatgatgttggcggtaatggac

SEQ ID NO: 1821 - DNA, 50 bp, Artificial Sequence
  source: /note="Description of Artificial Sequence: Synthetic oligonucleotide"
cagcatcttcaggaactcttgatcttggtagtggaatcgttttccaaagc

SEQ ID NO: 1822 - DNA, 50 bp, Artificial Sequence
  source: /note="Description of Artificial Sequence: Synthetic oligonucleotide"
cagcatcttcaggaactcttgatcttggtagtggaakcgttttccraagc

SEQ ID NO: 1823 - DNA, 50 bp, Artificial Sequence
  source: /note="Description of Artificial Sequence: Synthetic oligonucleotide"
ccctgaccctccccttccttccctactgtggacgcaggagaaatccaacg

SEQ ID NO: 1824 - DNA, 50 bp, Artificial Sequence
  source: /note="Description of Artificial Sequence: Synthetic oligonucleotide"
ctcaacacgctctcgctcttctttgctggcactgagaccaccagcaccac

SEQ ID NO: 1825 - DNA, 50 bp, Artificial Sequence; identical to SEQ ID NO: 1824
  source: /note="Description of Artificial Sequence: Synthetic oligonucleotide"

SEQ ID NO: 1826 - DNA, 50 bp, Artificial Sequence
  source: /note="Description of Artificial Sequence: Synthetic oligonucleotide"
acctgcaacatgagggtatttgagcatgagcaggaagccgtagcggagag

SEQ ID NO: 1827 - DNA, 50 bp, Artificial Sequence
  source: /note="Description of Artificial Sequence: Synthetic oligonucleotide"
atgagattcattggtcttcttttctgtacagagagagtctacagggagac

SEQ ID NO: 1828 - DNA, 50 bp, Artificial Sequence
  source: /note="Description of Artificial Sequence: Synthetic oligonucleotide"
atatcttttgatcttgtgatcctccctcaggacacagaagtatttctcat

SEQ ID NO: 1829 - DNA, 50 bp, Artificial Sequence
  source: /note="Description of Artificial Sequence: Synthetic oligonucleotide"
atatcttttgatcttgtgatcctcyctcaggacacagaagtatttctcat

SEQ ID NO: 1830 - DNA, 50 bp, Artificial Sequence; identical to SEQ ID NO: 1829
  source: /note="Description of Artificial Sequence: Synthetic oligonucleotide"

SEQ ID NO: 1831 - DNA, 50 bp, Artificial Sequence
  source: /note="Description of Artificial Sequence: Synthetic oligonucleotide"
gccagccccgtggccccagaagacatcgatctgacaccccaggagtgtgg

SEQ ID NO: 1832 - DNA, 50 bp, Artificial Sequence; identical to SEQ ID NO: 1831
  source: /note="Description of Artificial Sequence: Synthetic oligonucleotide"

SEQ ID NO: 1833 - DNA, 50 bp, Artificial Sequence; identical to SEQ ID NO: 1831
  source: /note="Description of Artificial Sequence: Synthetic oligonucleotide"

SEQ ID NO: 1834 - DNA, 50 bp, Artificial Sequence
  source: /note="Description of Artificial Sequence: Synthetic oligonucleotide"
tggaatcctttgacccccttccctcagccccttcagcggggcaggaagcg

SEQ ID NO: 1835 - DNA, 50 bp, Artificial Sequence; identical to SEQ ID NO: 1834
  source: /note="Description of Artificial Sequence: Synthetic oligonucleotide"

SEQ ID NO: 1836 - DNA, 50 bp, Artificial Sequence
  source: /note="Description of Artificial Sequence: Synthetic oligonucleotide"
aacattaacttggtgtatcgattggtttttgccatatatatatatatata

SEQ ID NO: 1837 - DNA, 50 bp, Artificial Sequence; identical to SEQ ID NO: 1836
  source: /note="Description of Artificial Sequence: Synthetic oligonucleotide"

SEQ ID NO: 1838 - DNA, 50 bp, Artificial Sequence
  source: /note="Description of Artificial Sequence: Synthetic oligonucleotide"
atgctcattgccttttcacagaactttctgtgcgacgtggtttattcccc

SEQ ID NO: 1839 - DNA, 50 bp, Artificial Sequence
  source: /note="Description of Artificial Sequence: Synthetic oligonucleotide"
ctggacagtcacctctctctgaaggaattctgaggcaagggttgcatacg

SEQ ID NO: 1840 - DNA, 50 bp, Artificial Sequence; identical to SEQ ID NO: 1838
  source: /note="Description of Artificial Sequence: Synthetic oligonucleotide"

SEQ ID NO: 1841 - DNA, 50 bp, Artificial Sequence
  source: /note="Description of Artificial Sequence: Synthetic oligonucleotide"
tttgctttcctggtgagcccatccccctatgagctttgtgctgtgccccg

SEQ ID NO: 1842 - DNA, 50 bp, Artificial Sequence
  source: /note="Description of Artificial Sequence: Synthetic oligonucleotide"
tttgctttcctggtgagcccatccccctrygagctttgtgctgtgccccg

SEQ ID NO: 1843 - DNA, 50 bp, Artificial Sequence
  source: /note="Description of Artificial Sequence: Synthetic oligonucleotide"
cagccccggcccagccaccatggtgtctttgctttcctggtgagcccatc

SEQ ID NO: 1844 - DNA, 50 bp, Artificial Sequence; identical to SEQ ID NO: 1843
  source: /note="Description of Artificial Sequence: Synthetic oligonucleotide"

SEQ ID NO: 1845 - DNA, 50 bp, Artificial Sequence
  source: /note="Description of Artificial Sequence: Synthetic oligonucleotide"
ttctcggtgcccactggacagccccggcccagccaccatggtgtctttgc

SEQ ID NO: 1846 - DNA, 50 bp, Artificial Sequence; identical to SEQ ID NO: 1845
  source: /note="Description of Artificial Sequence: Synthetic oligonucleotide"

SEQ ID NO: 1847 - DNA, 50 bp, Artificial Sequence; identical to SEQ ID NO: 1845
  source: /note="Description of Artificial Sequence: Synthetic oligonucleotide"

SEQ ID NO: 1848 - skipped

SEQ ID NO: 1849 - DNA, 50 bp, Artificial Sequence
  source: /note="Description of Artificial Sequence: Synthetic oligonucleotide"
cggggcacagcacaaagctcatagggggatgggctcaccaggaaagcaac

SEQ ID NO: 1850 - DNA, 50 bp, Artificial Sequence
  source: /note="Description of Artificial Sequence: Synthetic oligonucleotide"
acagcacaaagctcatagggggatgggctcaccaggaaagcaaagacacg

SEQ ID NO: 1851 - DNA, 50 bp, Artificial Sequence
  source: /note="Description of Artificial Sequence: Synthetic oligonucleotide"
acagcacaaagctcatagggggatgggctcaccaggaaagyramgacacg

SEQ ID NO: 1852 - DNA, 50 bp, Artificial Sequence
  source: /note="Description of Artificial Sequence: Synthetic oligonucleotide"
gcacttcagcttctcggtgcccactggacagccccggcccagccaccatc

SEQ ID NO: 1853 - DNA, 50 bp, Artificial Sequence
  source: /note="Description of Artificial Sequence: Synthetic oligonucleotide"
atagggggatgggctcaccaggaaagcaaagacaccatggtggctgggcc

SEQ ID NO: 1854 - DNA, 50 bp, Artificial Sequence
  source: /note="Description of Artificial Sequence: Synthetic oligonucleotide"
atagggggatgggctcaccaggaaagcaaagacaccmkrgtggctgggcc

SEQ ID NO: 1855 - DNA, 50 bp, Artificial Sequence
  source: /note="Description of Artificial Sequence: Synthetic oligonucleotide"
acctccctgctgcagcacttcagcttctcggtgcccactggacagccccg

SEQ ID NO: 1856 - DNA, 50 bp, Artificial Sequence
  source: /note="Description of Artificial Sequence: Synthetic oligonucleotide"
ctcaccaggaaagcaaagacaccatggtggctgggccggggctgtccagc

SEQ ID NO: 1857 - DNA, 50 bp, Artificial Sequence
  source: /note="Description of Artificial Sequence: Synthetic oligonucleotide"
aaagcaaagacaccatggtggctgggccggggctgtccagtgggcacagt

SEQ ID NO: 1858 - DNA, 50 bp, Artificial Sequence
  source: /note="Description of Artificial Sequence: Synthetic oligonucleotide"
gctcaccaggaaagcaaagacaccatggtggctgggccggggctgtccag

SEQ ID NO: 1859 - DNA, 50 bp, Artificial Sequence
  source: /note="Description of Artificial Sequence: Synthetic oligonucleotide"
ccatggtggctgggccggggctgtccagtgggcaccgagaagctgaagtc

SEQ ID NO: 1860 - DNA, 50 bp, Artificial Sequence; identical to SEQ ID NO: 1859
  source: /note="Description of Artificial Sequence: Synthetic oligonucleotide"

SEQ ID NO: 1861 - DNA, 50 bp, Artificial Sequence
  source: /note="Description of Artificial Sequence: Synthetic oligonucleotide"
gcccctggcccgcatggagctcttcctcttcttcacctccctgctgcagg

SEQ ID NO: 1862 - DNA, 50 bp, Artificial Sequence
  source: /note="Description of Artificial Sequence: Synthetic oligonucleotide"
ggggctgtccagtgggcaccgagaagctgaagtgctgcagcagggaggtg

SEQ ID NO: 1863 - DNA, 50 bp, Artificial Sequence
  source: /note="Description of Artificial Sequence: Synthetic oligonucleotide"
gaagctgaagtgctgcagcagggaggtkaagaagaggaagagctccatgc

SEQ ID NO: 1864 - DNA, 50 bp, Artificial Sequence
  source: /note="Description of Artificial Sequence: Synthetic oligonucleotide"
ggtgctgaaggatgaggccgtctgggagaagcccttccgcttccaccccg

SEQ ID NO: 1865 - DNA, 50 bp, Artificial Sequence; identical to SEQ ID NO: 821
  source: /note="Description of Artificial Sequence: Synthetic oligonucleotide"

SEQ ID NO: 1866 - DNA, 50 bp, Artificial Sequence
  source: /note="Description of Artificial Sequence: Synthetic oligonucleotide"
caggctcacatgccctacaccactgccgtgattcatgaggtgcagcgctc

SEQ ID NO: 1867 - DNA, 50 bp, Artificial Sequence; identical to SEQ ID NO: 1866
  source: /note="Description of Artificial Sequence: Synthetic oligonucleotide"

SEQ ID NO: 1868 - DNA, 50 bp, Artificial Sequence
  source: /note="Description of Artificial Sequence: Synthetic oligonucleotide"
gtccccaaagcgctgcacctcatgaatcacggcagtggtgtagggcatgc

SEQ ID NO: 1869 - DNA, 50 bp, Artificial Sequence
  source: /note="Description of Artificial Sequence: Synthetic oligonucleotide"
acggcagtggtgtagggcatgtgagcctggtcacccatctctggtyrccg

SEQ ID NO: 1870 - DNA, 50 bp, Artificial Sequence; identical to SEQ ID NO: 1869
  source: /note="Description of Artificial Sequence: Synthetic oligonucleotide"

SEQ ID NO: 1871 - DNA, 50 bp, Artificial Sequence
  source: /note="Description of Artificial Sequence: Synthetic oligonucleotide"
gacgcatgtctgtccaggccgtgtccaacaggagatcgacgacgtgatag

SEQ ID NO: 1872 - DNA, 50 bp, Artificial Sequence; identical to SEQ ID NO: 829
  source: /note="Description of Artificial Sequence: Synthetic oligonucleotide"

SEQ ID NO: 1873 - DNA, 50 bp, Artificial Sequence
  source: /note="Description of Artificial Sequence: Synthetic oligonucleotide"
ggaccccctgggtgctgacccattgtggggacgcatgtctgtccaggccc

SEQ ID NO: 1874 - DNA, 50 bp, Artificial Sequence; identical to SEQ ID NO: 1873
  source: /note="Description of Artificial Sequence: Synthetic oligonucleotide"

SEQ ID NO: 1875 - DNA, 50 bp, Artificial Sequence; identical to SEQ ID NO: 1873
  source: /note="Description of Artificial Sequence: Synthetic oligonucleotide"

SEQ ID NO: 1876 - DNA, 50 bp, Artificial Sequence
  source: /note="Description of Artificial Sequence: Synthetic oligonucleotide"
cctgtacccttcctccctcggcccctgcactgtttcccagatgggctcag

SEQ ID NO: 1877 - DNA, 50 bp, Artificial Sequence; identical to SEQ ID NO: 1876
  source: /note="Description of Artificial Sequence: Synthetic oligonucleotide"

SEQ ID NO: 1878 - DNA, 50 bp, Artificial Sequence; identical to SEQ ID NO: 1876
  source: /note="Description of Artificial Sequence: Synthetic oligonucleotide"

SEQ ID NO: 1879 - DNA, 50 bp, Artificial Sequence
  source: /note="Description of Artificial Sequence: Synthetic oligonucleotide"
gaggccccaggccagcgtggtcgaggyggtcaccatcccggcagagaacg

SEQ ID NO: 1880 - DNA, 50 bp, Artificial Sequence
  source: /note="Description of Artificial Sequence: Synthetic oligonucleotide"
gtggtcgaggtggtcaccatcccggcagagaacaggtcagccaccactag

SEQ ID NO: 1881 - DNA, 50 bp, Artificial Sequence; identical to SEQ ID NO: 1880
  source: /note="Description of Artificial Sequence: Synthetic oligonucleotide"

SEQ ID NO: 1882 - DNA, 50 bp, Artificial Sequence
  source: /note="Description of Artificial Sequence: Synthetic oligonucleotide"
accccgttctgtcccgagtatgctctcggccctgctcaggccaaggggag

SEQ ID NO: 1883 - DNA, 50 bp, Artificial Sequence; identical to SEQ ID NO: 1882
  source: /note="Description of Artificial Sequence: Synthetic oligonucleotide"

SEQ ID NO: 1884 - DNA, 50 bp, Artificial Sequence
  source: /note="Description of Artificial Sequence: Synthetic oligonucleotide"
gacccagcccagcccccccgagacctgactgaggccttcctkgcaragat

SEQ ID NO: 1885 - DNA, 50 bp, Artificial Sequence; identical to SEQ ID NO: 1884
  source: /note="Description of Artificial Sequence: Synthetic oligonucleotide"

SEQ ID NO: 1886 - DNA, 50 bp, Artificial Sequence
  source: /note="Description of Artificial Sequence: Synthetic oligonucleotide"
tgctaactgagcacaggatgacctgggacccagcccagccccyccyraga

SEQ ID NO: 1887 - DNA, 50 bp, Artificial Sequence; identical to SEQ ID NO: 1886
  source: /note="Description of Artificial Sequence: Synthetic oligonucleotide"

SEQ ID NO: 1888 - DNA, 50 bp, Artificial Sequence
  source: /note="Description of Artificial Sequence: Synthetic oligonucleotide"
tgctaactgagcacaggatgacctgggacccagcccagccccccccgaga

SEQ ID NO: 1889 - DNA, 50 bp, Artificial Sequence
  source: /note="Description of Artificial Sequence: Synthetic oligonucleotide"
gaaagccttttggaagcgtaggaccttgccagmcarcgctgggatrtgcg

SEQ ID NO: 1890 - DNA, 50 bp, Artificial Sequence; identical to SEQ ID NO: 1889
  source: /note="Description of Artificial Sequence: Synthetic oligonucleotide"

SEQ ID NO: 1891 - DNA, 50 bp, Artificial Sequence
  source: /note="Description of Artificial Sequence: Synthetic oligonucleotide"
gtccagcagcctgaggaagcgagggtcgtcgtactcgaagcggcgcccgc

SEQ ID NO: 1892 - DNA, 50 bp, Artificial Sequence
  source: /note="Description of Artificial Sequence: Synthetic oligonucleotide"
aacggtctcttggacaaagccgtgagcaacgtgatcgcctccctcacctg

SEQ ID NO: 1893 - DNA, 50 bp, Artificial Sequence
  source: /note="Description of Artificial Sequence: Synthetic oligonucleotide"
tccagcagcctgaggaagcgagggtcgtcgtactcgaagcggcgcccgcg

SEQ ID NO: 1894 - DNA, 50 bp, Artificial Sequence
  source: /note="Description of Artificial Sequence: Synthetic oligonucleotide"
caacggtctcttggacaaagccgtgagcaacgtgatcgcctccctcaccc

SEQ ID NO: 1895 - DNA, 50 bp, Artificial Sequence
  source: /note="Description of Artificial Sequence: Synthetic oligonucleotide"
ggcgaccccttacccgcatctcccacccccargacgcccctttygcccct

SEQ ID NO: 1896 - DNA, 50 bp, Artificial Sequence; identical to SEQ ID NO: 1895
  source: /note="Description of Artificial Sequence: Synthetic oligonucleotide"

SEQ ID NO: 1897 - DNA, 50 bp, Artificial Sequence
  source: /note="Description of Artificial Sequence: Synthetic oligonucleotide"
ggtgaccgaggaggccgcctgcctttgtgccgccttcgccaaccactccg

SEQ ID NO: 1898 - DNA, 50 bp, Artificial Sequence; identical to SEQ ID NO: 1897
  source: /note="Description of Artificial Sequence: Synthetic oligonucleotide"

SEQ ID NO: 1899 - DNA, 50 bp, Artificial Sequence
  source: /note="Description of Artificial Sequence: Synthetic oligonucleotide"
gtgggtgaccgaggaggccgcctgcctttgtgccgccttcgcyraccamg

SEQ ID NO: 1900 - DNA, 50 bp, Artificial Sequence
  source: /note="Description of Artificial Sequence: Synthetic oligonucleotide"
gtgttcctggcgcgctatgggcccgcgtggcgcgagcagaggcgcttctc

SEQ ID NO: 1901 - DNA, 50 bp, Artificial Sequence
  source: /note="Description of Artificial Sequence: Synthetic oligonucleotide"
caggcccaagttgcgcaaggtggacacggagaagcgcctctgctcgcgcc

SEQ ID NO: 1902 - DNA, 50 bp, Artificial Sequence
  source: /note="Description of Artificial Sequence: Synthetic oligonucleotide"
acggagaagcgcctctgctcgcgccacgcgggcccatagcgcgccaggat

SEQ ID NO: 1903 - DNA, 50 bp, Artificial Sequence
  source: /note="Description of Artificial Sequence: Synthetic oligonucleotide"
ctctgtccccaccgctgcttgccttgggaacgcggcccgaaacccaggac

SEQ ID NO: 1904 - DNA, 50 bp, Artificial Sequence
  source: /note="Description of Artificial Sequence: Synthetic oligonucleotide"
ctctgtccccaccgctgcttgccttgggaacgcggcccraarcycaggac

SEQ ID NO: 1905 - DNA, 50 bp, Artificial Sequence
  source: /note="Description of Artificial Sequence: Synthetic oligonucleotide"
ctggtgacccacggcgaggacaccgccgaccgcccgcctgtgcccatcac

SEQ ID NO: 1906 - DNA, 50 bp, Artificial Sequence; identical to SEQ ID NO: 1905
  source: /note="Description of Artificial Sequence: Synthetic oligonucleotide"

SEQ ID NO: 1907 - DNA, 50 bp, Artificial Sequence
  source: /note="Description of Artificial Sequence: Synthetic oligonucleotide"
ctgcttgccttgggaacgcggcccgaaacccaggayctggdwgatgggcg

SEQ ID NO: 1908 - DNA, 50 bp, Artificial Sequence
  source: /note="Description of Artificial Sequence: Synthetic oligonucleotide"
caggatctgggtgatgggcacaggcgggcggtcggcggtgtcctcgccgc

SEQ ID NO: 1909 - DNA, 50 bp, Artificial Sequence; identical to SEQ ID NO: 1908
  source: /note="Description of Artificial Sequence: Synthetic oligonucleotide"

SEQ ID NO: 1910 - DNA, 50 bp, Artificial Sequence; identical to SEQ ID NO: 1908
  source: /note="Description of Artificial Sequence: Synthetic oligonucleotide"

SEQ ID NO: 1911 - DNA, 50 bp, Artificial Sequence
  source: /note="Description of Artificial Sequence: Synthetic oligonucleotide"
cacaggcgggcggtcggcggtgtcctcgccgygggtcaccakcrcctcgg

SEQ ID NO: 1912 - DNA, 50 bp, Artificial Sequence
  source: /note="Description of Artificial Sequence: Synthetic oligonucleotide"
cacaggcgggcggtcggcggtgtcctcgccgtgggtcaccagcgcctcgg

SEQ ID NO: 1913 - DNA, 50 bp, Artificial Sequence
  source: /note="Description of Artificial Sequence: Synthetic oligonucleotide"
cagctggcctggacgccggtggtcgtgctcaatgggctggcggccgtgcc

SEQ ID NO: 1914 - DNA, 50 bp, Artificial Sequence
  source: /note="Description of Artificial Sequence: Synthetic oligonucleotide"
cagcccattgagcacgaccaccggcgtccaggccagctgcaggctgaacg

SEQ ID NO: 1915 - DNA, 50 bp, Artificial Sequence
  source: /note="Description of Artificial Sequence: Synthetic oligonucleotide"
agtctggggtgatcctggcttgacaagaggccctgaccctccctctgcac

SEQ ID NO: 1916 - DNA, 50 bp, Artificial Sequence; identical to SEQ ID NO: 1915
  source: /note="Description of Artificial Sequence: Synthetic oligonucleotide"

SEQ ID NO: 1917 - DNA, 50 bp, Artificial Sequence; identical to SEQ ID NO: 864
  source: /note="Description of Artificial Sequence: Synthetic oligonucleotide"

SEQ ID NO: 1918 - DNA, 50 bp, Artificial Sequence
  source: /note="Description of Artificial Sequence: Synthetic oligonucleotide"
gccgtgatagtggccatcttcctgctcctggtggacctgatgcaccggcg

SEQ ID NO: 1919 - DNA, 50 bp, Artificial Sequence
  source: /note="Description of Artificial Sequence: Synthetic oligonucleotide"
ccagaggagcccatttggtagtgaggcaggtatggggctagaagcactgg

SEQ ID NO: 1920 - DNA, 50 bp, Artificial Sequence
  source: /note="Description of Artificial Sequence: Synthetic oligonucleotide"
actggacagccccggcccagccaccatggtgtctttgctttcctggtgag

SEQ ID NO: 1921 - DNA, 50 bp, Artificial Sequence; identical to SEQ ID NO: 1920
  source: /note="Description of Artificial Sequence: Synthetic oligonucleotide"

SEQ ID NO: 1922 - DNA, 50 bp, Artificial Sequence; identical to SEQ ID NO: 1920
  source: /note="Description of Artificial Sequence: Synthetic oligonucleotide"

SEQ ID NO: 1923 - DNA, 50 bp, Artificial Sequence
  source: /note="Description of Artificial Sequence: Synthetic oligonucleotide"
ctgggtgtgacccatatgacatcccgtgacatcgaagtacagggcttccc

SEQ ID NO: 1924 - DNA, 50 bp, Artificial Sequence
  source: /note="Description of Artificial Sequence: Synthetic oligonucleotide"
gacccagcccagcccccccgagacctgactgaggccttcctggcagagat

SEQ ID NO: 1925 - DNA, 50 bp, Artificial Sequence
  source: /note="Description of Artificial Sequence: Synthetic oligonucleotide"
tggttggcgaaggcggcacaaaggcaggcggcctcctcggtcacccactg

SEQ ID NO: 1926 - DNA, 50 bp, Artificial Sequence; identical to SEQ ID NO: 1925
  source: /note="Description of Artificial Sequence: Synthetic oligonucleotide"

SEQ ID NO: 1927 - DNA, 50 bp, Artificial Sequence; identical to SEQ ID NO: 1902
  source: /note="Description of Artificial Sequence: Synthetic oligonucleotide"

SEQ ID NO: 1928 - DNA, 50 bp, Artificial Sequence
  source: /note="Description of Artificial Sequence: Synthetic oligonucleotide"
ctaatgccttcatggccacgcgcacgtgcccgtcccacccccaggggtga

SEQ ID NO: 1929 - DNA, 50 bp, Artificial Sequence; identical to SEQ ID NO: 1905
  source: /note="Description of Artificial Sequence: Synthetic oligonucleotide"

SEQ ID NO: 1930 - DNA, 50 bp, Artificial Sequence
  source: /note="Description of Artificial Sequence: Synthetic oligonucleotide"
agtctggggggatcctggcttgacaagaggccctgaccctccctctgcac

SEQ ID NO: 1931 - DNA, 50 bp, Artificial Sequence
  source: /note="Description of Artificial Sequence: Synthetic oligonucleotide"
gaagaacgacataaaagttggggaattgactgtctttttgaaaagttatg

SEQ ID NO: 1932 - DNA, 50 bp, Artificial Sequence; identical to SEQ ID NO: 879
  source: /note="Description of Artificial Sequence: Synthetic oligonucleotide"

SEQ ID NO: 1933 - DNA, 50 bp, Artificial Sequence; identical to SEQ ID NO: 879
  source: /note="Description of Artificial Sequence: Synthetic oligonucleotide"

SEQ ID NO: 1934 - DNA, 50 bp, Artificial Sequence; identical to SEQ ID NO: 877
  source: /note="Description of Artificial Sequence: Synthetic oligonucleotide"

SEQ ID NO: 1935 - DNA, 50 bp, Artificial Sequence
  source: /note="Description of Artificial Sequence: Synthetic oligonucleotide"
atcccaagttcactgatttccacaccaactacactgtgtccccggtctgc

SEQ ID NO: 1936 - DNA, 50 bp, Artificial Sequence
  source: /note="Description of Artificial Sequence: Synthetic oligonucleotide"
tcatttgaaaacataatttaagtgtaaatgtatgattttatgcaggtttg

SEQ ID NO: 1937 - DNA, 50 bp, Artificial Sequence; identical to SEQ ID NO: 1935
  source: /note="Description of Artificial Sequence: Synthetic oligonucleotide"

SEQ ID NO: 1938 - DNA, 50 bp, Artificial Sequence
  source: /note="Description of Artificial Sequence: Synthetic oligonucleotide"
taaacaatgtacatgaacatacctttccaatttttcagatagattgtcag

SEQ ID NO: 1939 - DNA, 50 bp, Artificial Sequence; identical to SEQ ID NO: 1938
  source: /note="Description of Artificial Sequence: Synthetic oligonucleotide"

SEQ ID NO: 1940 - DNA, 50 bp, Artificial Sequence; identical to SEQ ID NO: 1938
  source: /note="Description of Artificial Sequence: Synthetic oligonucleotide"

SEQ ID NO: 1941 - DNA, 50 bp, Artificial Sequence
  source: /note="Description of Artificial Sequence: Synthetic oligonucleotide"
acataatgaatgtacaaatgagatccttacccctaaatataaaaagattc

SEQ ID NO: 1942 - DNA, 50 bp, Artificial Sequence; identical to SEQ ID NO: 1941
  source: /note="Description of Artificial Sequence: Synthetic oligonucleotide"

SEQ ID NO: 1943 - DNA, 50 bp, Artificial Sequence; identical to SEQ ID NO: 1941
  source: /note="Description of Artificial Sequence: Synthetic oligonucleotide"

SEQ ID NO: 1944 - DNA, 50 bp, Artificial Sequence
  source: /note="Description of Artificial Sequence: Synthetic oligonucleotide"
gaagctatgattcttcccagtaagagaggctgtactgctttggtgacttc

SEQ ID NO: 1945 - DNA, 50 bp, Artificial Sequence; identical to SEQ ID NO: 1944
  source: /note="Description of Artificial Sequence: Synthetic oligonucleotide"

SEQ ID NO: 1946 - DNA, 50 bp, Artificial Sequence; identical to SEQ ID NO: 1944
  source: /note="Description of Artificial Sequence: Synthetic oligonucleotide"

SEQ ID NO: 1947 - DNA, 50 bp, Artificial Sequence
  source: /note="Description of Artificial Sequence: Synthetic oligonucleotide"
caccaaagcagtacagcctctcttactgggaagaatcatagcttcctatg

SEQ ID NO: 1948 - DNA, 50 bp, Artificial Sequence; identical to SEQ ID NO: 1947
  source: /note="Description of Artificial Sequence: Synthetic oligonucleotide"

SEQ ID NO: 1949 - DNA, 50 bp, Artificial Sequence; identical to SEQ ID NO: 1947
  source: /note="Description of Artificial Sequence: Synthetic oligonucleotide"

SEQ ID NO: 1950 - DNA, 50 bp, Artificial Sequence
  source: /note="Description of Artificial Sequence: Synthetic oligonucleotide"
cttactgggaagaatcatagcttcctatgacccggataacaaggaggaac

SEQ ID NO: 1951 - DNA, 50 bp, Artificial Sequence
  source: /note="Description of Artificial Sequence: Synthetic oligonucleotide"
ttactgggaagaatcatagcttcctatgacccggataacaaggaggaacg

SEQ ID NO: 1952 - DNA, 50 bp, Artificial Sequence; identical to SEQ ID NO: 1951
  source: /note="Description of Artificial Sequence: Synthetic oligonucleotide"

SEQ ID NO: 1953 - DNA, 50 bp, Artificial Sequence
  source: /note="Description of Artificial Sequence: Synthetic oligonucleotide"
tattggacaacttgttagtctcctttccaacaacctgaacaaatttgatg

SEQ ID NO: 1954 - DNA, 50 bp, Artificial Sequence
  source: /note="Description of Artificial Sequence: Synthetic oligonucleotide"
ttatctgtgcttccctatgcactaatcaaaggaatcatcctcyggaaaac

SEQ ID NO: 1955 - DNA, 50 bp, Artificial Sequence; identical to SEQ ID NO: 1954
  source: /note="Description of Artificial Sequence: Synthetic oligonucleotide"

SEQ ID NO: 1956 - DNA, 50 bp, Artificial Sequence
  source: /note="Description of Artificial Sequence: Synthetic oligonucleotide"
ttatctgtgcttccctatgcactaatcaaaggaatcatcctccggaaaac

SEQ ID NO: 1957 - DNA, 50 bp, Artificial Sequence
  source: /note="Description of Artificial Sequence: Synthetic oligonucleotide"
ctatgcactaatcaaaggaatcatcctcyggaaaahattcaycaccatcc

SEQ ID NO: 1958 - DNA, 50 bp, Artificial Sequence
  source: /note="Description of Artificial Sequence: Synthetic oligonucleotide"
gcccagggaaattgccgagtgaccgccatgygcagaacaatgcagaatgg

SEQ ID NO: 1959 - DNA, 50 bp, Artificial Sequence
  source: /note="Description of Artificial Sequence: Synthetic oligonucleotide"
gtcataccatgtttgtacagcccagggaaattgccgagtgaccgccatgg

SEQ ID NO: 1960 - DNA, 50 bp, Artificial Sequence
  source: /note="Description of Artificial Sequence: Synthetic oligonucleotide"
gtcataccatgtttgtacagcccagggaaattgcygagtgaccgccatgc

SEQ ID NO: 1961 - DNA, 50 bp, Artificial Sequence; identical to SEQ ID NO: 1960
  source: /note="Description of Artificial Sequence: Synthetic oligonucleotide"

SEQ ID NO: 1962 - DNA, 50 bp, Artificial Sequence
  source: /note="Description of Artificial Sequence: Synthetic oligonucleotide"
agtgaagaacaaaagaactaccttgcctgctccagtggatccagcaaccg

SEQ ID NO: 1963 - DNA, 50 bp, Artificial Sequence; identical to SEQ ID NO: 1962
  source: /note="Description of Artificial Sequence: Synthetic oligonucleotide"

SEQ ID NO: 1964 - DNA, 50 bp, Artificial Sequence; identical to SEQ ID NO: 1962
  source: /note="Description of Artificial Sequence: Synthetic oligonucleotide"

SEQ ID NO: 1965 - DNA, 50 bp, Artificial Sequence
  source: /note="Description of Artificial Sequence: Synthetic oligonucleotide"
agaaaatatcatctttggtgtttcctatgatgaatatagatacagaagcg

SEQ ID NO: 1966 - DNA, 50 bp, Artificial Sequence; identical to SEQ ID NO: 1965
  source: /note="Description of Artificial Sequence: Synthetic oligonucleotide"

SEQ ID NO: 1967 - DNA, 50 bp, Artificial Sequence; identical to SEQ ID NO: 1965
  source: /note="Description of Artificial Sequence: Synthetic oligonucleotide"

SEQ ID NO: 1968 - DNA, 50 bp, Artificial Sequence
  source: /note="Description of Artificial Sequence: Synthetic oligonucleotide"
ttggtaataggacatctccaagtttgcagagaaagacaatatagttcttg

SEQ ID NO: 1969 - DNA, 50 bp, Artificial Sequence
  source: /note="Description of Artificial Sequence: Synthetic oligonucleotide"
tttgcagagaaagacaatatagttcttggagaaggtggaatcacactgag

SEQ ID NO: 1970 - DNA, 50 bp, Artificial Sequence
  source: /note="Description of Artificial Sequence: Synthetic oligonucleotide"
ttgcagagaaagacaatatagttcttggagaaggtggaatcacactgagg

SEQ ID NO: 1971 - DNA, 50 bp, Artificial Sequence; identical to SEQ ID NO: 1970
  source: /note="Description of Artificial Sequence: Synthetic oligonucleotide"

SEQ ID NO: 1972 - DNA, 50 bp, Artificial Sequence; identical to SEQ ID NO: 1970
  source: /note="Description of Artificial Sequence: Synthetic oligonucleotide"

SEQ ID NO: 1973 - DNA, 50 bp, Artificial Sequence
  source: /note="Description of Artificial Sequence: Synthetic oligonucleotide"
agacaatatagttcttggagaaggtggaatcacactgagtggaggtcaac

SEQ ID NO: 1974 - DNA, 50 bp, Artificial Sequence; identical to SEQ ID NO: 1973
  source: /note="Description of Artificial Sequence: Synthetic oligonucleotide"

SEQ ID NO: 1975 - DNA, 50 bp, Artificial Sequence
  source: /note="Description of Artificial Sequence: Synthetic oligonucleotide"
agaaggtggaatcacactgagtggaggtcaacgagcaagaatttctttag

SEQ ID NO: 1976 - DNA, 50 bp, Artificial Sequence; identical to SEQ ID NO: 1975
  source: /note="Description of Artificial Sequence: Synthetic oligonucleotide"

SEQ ID NO: 1977 - DNA, 50 bp, Artificial Sequence
  source: /note="Description of Artificial Sequence: Synthetic oligonucleotide"
gaatgacatttacagcaaatgcttgctagaccaataattagttattcacc

SEQ ID NO: 1978 - DNA, 50 bp, Artificial Sequence
  source: /note="Description of Artificial Sequence: Synthetic oligonucleotide"
ggtggaatcacactgagtggaggtcaacgagcaagaatttctttagcaag

SEQ ID NO: 1979 - DNA, 50 bp, Artificial Sequence; identical to SEQ ID NO: 1978
  source: /note="Description of Artificial Sequence: Synthetic oligonucleotide"

SEQ ID NO: 1980 - DNA, 50 bp, Artificial Sequence
  source: /note="Description of Artificial Sequence: Synthetic oligonucleotide"
tctttttctgttaaaacatctaggtatccaaaaggagagtctaataaatc

SEQ ID NO: 1981 - DNA, 50 bp, Artificial Sequence; identical to SEQ ID NO: 1980
  source: /note="Description of Artificial Sequence: Synthetic oligonucleotide"

SEQ ID NO: 1982 - DNA, 50 bp, Artificial Sequence
  source: /note="Description of Artificial Sequence: Synthetic oligonucleotide"
tacaaagatgctgatttgtatttattagactctccttttggatacctagg

SEQ ID NO: 1983 - DNA, 50 bp, Artificial Sequence; identical to SEQ ID NO: 1982
  source: /note="Description of Artificial Sequence: Synthetic oligonucleotide"

SEQ ID NO: 1984 - DNA, 50 bp, Artificial Sequence; identical to SEQ ID NO: 1982
  source: /note="Description of Artificial Sequence: Synthetic oligonucleotide"

SEQ ID NO: 1985 - DNA, 50 bp, Artificial Sequence
  source: /note="Description of Artificial Sequence: Synthetic oligonucleotide"
gcatgaaactgtactgtcttattgtaatagccataattcttttattcagg

SEQ ID NO: 1986 - DNA, 50 bp, Artificial Sequence
  source: /note="Description of Artificial Sequence: Synthetic oligonucleotide"
ttccatgtagtcactgctggtatgctctccatatcatcaaaaaagcactc

SEQ ID NO: 1987 - DNA, 50 bp, Artificial Sequence
  source: /note="Description of Artificial Sequence: Synthetic oligonucleotide"
atttaatcaacagaaataaaacacaatctacacaataggacatggaatac

SEQ ID NO: 1988 - DNA, 50 bp, Artificial Sequence; identical to SEQ ID NO: 1987
  source: /note="Description of Artificial Sequence: Synthetic oligonucleotide"

SEQ ID NO: 1989 - DNA, 50 bp, Artificial Sequence
  source: /note="Description of Artificial Sequence: Synthetic oligonucleotide"
tgtgattagagtatgcaccagtggtagacctctgaagaatcccatagcat

SEQ ID NO: 1990 - DNA, 50 bp, Artificial Sequence
  source: /note="Description of Artificial Sequence: Synthetic oligonucleotide"
tgtgattagagtatgcaccagtggtagacctctgaagaatcccatagcag

SEQ ID NO: 1991 - DNA, 50 bp, Artificial Sequence
  source: /note="Description of Artificial Sequence: Synthetic oligonucleotide"
cctattgatggtggatcagcagtttcatttcttagacctagtaaagtacc

SEQ ID NO: 1992 - DNA, 50 bp, Artificial Sequence; identical to SEQ ID NO: 1991
  source: /note="Description of Artificial Sequence: Synthetic oligonucleotide"

SEQ ID NO: 1993 - DNA, 50 bp, Artificial Sequence; identical to SEQ ID NO: 1991
  source: /note="Description of Artificial Sequence: Synthetic oligonucleotide"

SEQ ID NO: 1994 - DNA, 50 bp, Artificial Sequence
  source: /note="Description of Artificial Sequence: Synthetic oligonucleotide"
gtcaaatatggtaagaggcagaaggtcatccaaaattgctatatctttgg

SEQ ID NO: 1995 - DNA, 50 bp, Artificial Sequence; identical to SEQ ID NO: 1994
  source: /note="Description of Artificial Sequence: Synthetic oligonucleotide"

SEQ ID NO: 1996 - DNA, 50 bp, Artificial Sequence; identical to SEQ ID NO: 1994
  source: /note="Description of Artificial Sequence: Synthetic oligonucleotide"

SEQ ID NO: 1997 - DNA, 50 bp, Artificial Sequence; identical to SEQ ID NO: 1040
  source: /note="Description of Artificial Sequence: Synthetic oligonucleotide"

SEQ ID NO: 1998 - DNA, 50 bp, Artificial Sequence; identical to SEQ ID NO: 1039
  source: /note="Description of Artificial Sequence: Synthetic oligonucleotide"

SEQ ID NO: 1999 - DNA, 50 bp, Artificial Sequence; identical to SEQ ID NO: 1040
  source: /note="Description of Artificial Sequence: Synthetic oligonucleotide"

SEQ ID NO: 2000 - DNA, 50 bp, Artificial Sequence
  source: /note="Description of Artificial Sequence: Synthetic oligonucleotide"
aaggcacgaagtgtccatagtccttttaagcttgtaacaagatgagtgac

SEQ ID NO: 2001 - DNA, 50 bp, Artificial Sequence; identical to SEQ ID NO: 2000
  source: /note="Description of Artificial Sequence: Synthetic oligonucleotide"

SEQ ID NO: 2002 - DNA, 50 bp, Artificial Sequence
  source: /note="Description of Artificial Sequence: Synthetic oligonucleotide"
cgtccgaaggcacgaagtgtccatagtccttttaagcttgtaacaagatg

SEQ ID NO: 2003 - DNA, 50 bp, Artificial Sequence; identical to SEQ ID NO: 2002
  source: /note="Description of Artificial Sequence: Synthetic oligonucleotide"

SEQ ID NO: 2004 - DNA, 50 bp, Artificial Sequence; identical to SEQ ID NO: 2002
  source: /note="Description of Artificial Sequence: Synthetic oligonucleotide"

SEQ ID NO: 2005 - DNA, 50 bp, Artificial Sequence
  source: /note="Description of Artificial Sequence: Synthetic oligonucleotide"
agtccaattttcactcatcttgttacaagcttaamaggactatggacacc

SEQ ID NO: 2006 - DNA, 50 bp, Artificial Sequence; identical to SEQ ID NO: 2005
  source: /note="Description of Artificial Sequence: Synthetic oligonucleotide"

SEQ ID NO: 2007 - DNA, 50 bp, Artificial Sequence
  source: /note="Description of Artificial Sequence: Synthetic oligonucleotide"
agtccaattttcactcatcttgttacaagcttaaaaggactatggacacc

SEQ ID NO: 2008 - DNA, 50 bp, Artificial Sequence
  source: /note="Description of Artificial Sequence: Synthetic oligonucleotide"
tccaattttcactcatcttgttacaagcttaaaaggactatggacacttc

SEQ ID NO: 2009 - DNA, 50 bp, Artificial Sequence; identical to SEQ ID NO: 2008
  source: /note="Description of Artificial Sequence: Synthetic oligonucleotide"

SEQ ID NO: 2010 - DNA, 50 bp, Artificial Sequence; identical to SEQ ID NO: 2008
  source: /note="Description of Artificial Sequence: Synthetic oligonucleotide"

SEQ ID NO: 2011 - DNA, 50 bp, Artificial Sequence
  source: /note="Description of Artificial Sequence: Synthetic oligonucleotide"
ccaattttcactcatcttgttacaagcttaaaaggactatggacacttcg

SEQ ID NO: 2012 - DNA, 50 bp, Artificial Sequence; identical to SEQ ID NO: 2011
  source: /note="Description of Artificial Sequence: Synthetic oligonucleotide"

SEQ ID NO: 2013 - DNA, 50 bp, Artificial Sequence; identical to SEQ ID NO: 2011
  source: /note="Description of Artificial Sequence: Synthetic oligonucleotide"

SEQ ID NO: 2014 - DNA, 50 bp, Artificial Sequence
  source: /note="Description of Artificial Sequence: Synthetic oligonucleotide"
aattttcactcatcttgttacaagcttaaaaggactatggacacttcgtg

SEQ ID NO: 2015 - DNA, 50 bp, Artificial Sequence; identical to SEQ ID NO: 2014
  source: /note="Description of Artificial Sequence: Synthetic oligonucleotide"

SEQ ID NO: 2016 - DNA, 50 bp, Artificial Sequence
  source: /note="Description of Artificial Sequence: Synthetic oligonucleotide"
agtatgtaaattcagagctttgtggaacrgagtttcwaagtaaggctgcc

SEQ ID NO: 2017 - DNA, 50 bp, Artificial Sequence; identical to SEQ ID NO: 2016
  source: /note="Description of Artificial Sequence: Synthetic oligonucleotide"

SEQ ID NO: 2018 - DNA, 50 bp, Artificial Sequence; identical to SEQ ID NO: 2016
  source: /note="Description of Artificial Sequence: Synthetic oligonucleotide"

SEQ ID NO: 2019 - DNA, 50 bp, Artificial Sequence; identical to SEQ ID NO: 1075
  source: /note="Description of Artificial Sequence: Synthetic oligonucleotide"

SEQ ID NO: 2020 - DNA, 50 bp, Artificial Sequence; identical to SEQ ID NO: 1074
  source: /note="Description of Artificial Sequence: Synthetic oligonucleotide"

SEQ ID NO: 2021 - DNA, 50 bp, Artificial Sequence; identical to SEQ ID NO: 1074
  source: /note="Description of Artificial Sequence: Synthetic oligonucleotide"

SEQ ID NO: 2022 - DNA, 50 bp, Artificial Sequence
  source: /note="Description of Artificial Sequence: Synthetic oligonucleotide"
ggacggcagccttactttgaaactcygttccacaaagctctgaatttacc

SEQ ID NO: 2023 - DNA, 50 bp, Artificial Sequence; identical to SEQ ID NO: 2022
  source: /note="Description of Artificial Sequence: Synthetic oligonucleotide"

SEQ ID NO: 2024 - DNA, 50 bp, Artificial Sequence; identical to SEQ ID NO: 2022
  source: /note="Description of Artificial Sequence: Synthetic oligonucleotide"

SEQ ID NO: 2025 - DNA, 50 bp, Artificial Sequence
  source: /note="Description of Artificial Sequence: Synthetic oligonucleotide"
catactgccaactggttcttgtacctgtcaacactgcgctggttccaaat

SEQ ID NO: 2026 - DNA, 50 bp, Artificial Sequence
  source: /note="Description of Artificial Sequence: Synthetic oligonucleotide"
aatgaaggtaacagcaatgaagaagatgacaaaaatcatttctattctca

SEQ ID NO: 2027 - DNA, 50 bp, Artificial Sequence; identical to SEQ ID NO: 2026
  source: /note="Description of Artificial Sequence: Synthetic oligonucleotide"

SEQ ID NO: 2028 - DNA, 50 bp, Artificial Sequence
  source: /note="Description of Artificial Sequence: Synthetic oligonucleotide"
agccatgaatatcatgagtacattgcagtgggctgtaaactccagcatag

SEQ ID NO: 2029 - DNA, 50 bp, Artificial Sequence; identical to SEQ ID NO: 2028
  source: /note="Description of Artificial Sequence: Synthetic oligonucleotide"

SEQ ID NO: 2030 - DNA, 50 bp, Artificial Sequence; identical to SEQ ID NO: 2028
  source: /note="Description of Artificial Sequence: Synthetic oligonucleotide"

SEQ ID NO: 2031 - DNA, 50 bp, Artificial Sequence
  source: /note="Description of Artificial Sequence: Synthetic oligonucleotide"
aattgcattgtaccatgaatagaacatttcctttcagggtgtcttactcg

SEQ ID NO: 2032 - DNA, 50 bp, Artificial Sequence; identical to SEQ ID NO: 2031
  source: /note="Description of Artificial Sequence: Synthetic oligonucleotide"

SEQ ID NO: 2033 - DNA, 50 bp, Artificial Sequence; identical to SEQ ID NO: 2031
  source: /note="Description of Artificial Sequence: Synthetic oligonucleotide"

SEQ ID NO: 2034 - DNA, 50 bp, Artificial Sequence
  source: /note="Description of Artificial Sequence: Synthetic oligonucleotide"
tgtcacagaagtgatcccatcacttttaccttataggtgggcctcttggg

SEQ ID NO: 2035 - DNA, 50 bp, Artificial Sequence; identical to SEQ ID NO: 2034
  source: /note="Description of Artificial Sequence: Synthetic oligonucleotide"

SEQ ID NO: 2036 - DNA, 50 bp, Artificial Sequence; identical to SEQ ID NO: 2034
  source: /note="Description of Artificial Sequence: Synthetic oligonucleotide"

SEQ ID NO: 2037 - DNA, 50 bp, Artificial Sequence
  source: /note="Description of Artificial Sequence: Synthetic oligonucleotide"
ataggtgggcctcttgggaagaactggatcagggaagagtactttgttac

SEQ ID NO: 2038 - DNA, 50 bp, Artificial Sequence
  source: /note="Description of Artificial Sequence: Synthetic oligonucleotide"
aaggctttcctccactgttgcaaagttattgaatcccaagacacaccatc

SEQ ID NO: 2039 - DNA, 50 bp, Artificial Sequence
  source: /note="Description of Artificial Sequence: Synthetic oligonucleotide"
aaatccagatcgatggtgtgtcttgggattcaataactttgcaacagtgg

SEQ ID NO: 2040 - DNA, 50 bp, Artificial Sequence; identical to SEQ ID NO: 2039
  source: /note="Description of Artificial Sequence: Synthetic oligonucleotide"

SEQ ID NO: 2041 - DNA, 50 bp, Artificial Sequence; identical to SEQ ID NO: 2039
  source: /note="Description of Artificial Sequence: Synthetic oligonucleotide"

SEQ ID NO: 2042 - DNA, 50 bp, Artificial Sequence
  source: /note="Description of Artificial Sequence: Synthetic oligonucleotide"
ctgcaactttccatatttcttgatcactccactgttcatagggatccaac

SEQ ID NO: 2043 - DNA, 50 bp, Artificial Sequence; identical to SEQ ID NO: 2042
  source: /note="Description of Artificial Sequence: Synthetic oligonucleotide"

SEQ ID NO: 2044 - DNA, 50 bp, Artificial Sequence; identical to SEQ ID NO: 2042
  source: /note="Description of Artificial Sequence: Synthetic oligonucleotide"

SEQ ID NO: 2045 - DNA, 50 bp, Artificial Sequence
  source: /note="Description of Artificial Sequence: Synthetic oligonucleotide"
ccccagattcattctttacatttctaattaagactcatcttattttcatg

SEQ ID NO: 2046 - DNA, 50 bp, Artificial Sequence; identical to SEQ ID NO: 2045
  source: /note="Description of Artificial Sequence: Synthetic oligonucleotide"

SEQ ID NO: 2047 - DNA, 50 bp, Artificial Sequence
  source: /note="Description of Artificial Sequence: Synthetic oligonucleotide"
ggcagtggtgggacacacttaccagatggtggggtagatcttcttcttgg

SEQ ID NO: 2048 - DNA, 50 bp, Artificial Sequence; identical to SEQ ID NO: 2047
  source: /note="Description of Artificial Sequence: Synthetic oligonucleotide"

SEQ ID NO: 2049 - DNA, 50 bp, Artificial Sequence
  source: /note="Description of Artificial Sequence: Synthetic oligonucleotide"
ttcaccccactgctgcaccagattgagctggagaagcccaagcccatccc

SEQ ID NO: 2050 - DNA, 50 bp, Artificial Sequence; identical to SEQ ID NO: 2049
  source: /note="Description of Artificial Sequence: Synthetic oligonucleotide"

SEQ ID NO: 2051 - DNA, 50 bp, Artificial Sequence
  source: /note="Description of Artificial Sequence: Synthetic oligonucleotide"
ccatgtcccctcagcgacgagctccgtgaggcctggcgtattttcacccg

SEQ ID NO: 2052 - DNA, 50 bp, Artificial Sequence; identical to SEQ ID NO: 2051
  source: /note="Description of Artificial Sequence: Synthetic oligonucleotide"

SEQ ID NO: 2053 - DNA, 50 bp, Artificial Sequence; identical to SEQ ID NO: 2051
  source: /note="Description of Artificial Sequence: Synthetic oligonucleotide"

SEQ ID NO: 2054 - DNA, 50 bp, Artificial Sequence; identical to SEQ ID NO: 1177
  source: /note="Description of Artificial Sequence: Synthetic oligonucleotide"

SEQ ID NO: 2055 - DNA, 50 bp, Artificial Sequence
  source: /note="Description of Artificial Sequence: Synthetic oligonucleotide"
ggcttgggcttctccagctcaatctggtgcagcagtsgggtgaaaatacg

SEQ ID NO: 2056 - DNA, 50 bp, Artificial Sequence; identical to SEQ ID NO: 1177
  source: /note="Description of Artificial Sequence: Synthetic oligonucleotide"

SEQ ID NO: 2057 - DNA, 50 bp, Artificial Sequence
  source: /note="Description of Artificial Sequence: Synthetic oligonucleotide"
gcttctccagctcaatctggtgcagcagtsgggtgaaaataydccaggcc

SEQ ID NO: 2058 - DNA, 50 bp, Artificial Sequence; identical to SEQ ID NO: 2057
  source: /note="Description of Artificial Sequence: Synthetic oligonucleotide"

SEQ ID NO: 2059 - DNA, 50 bp, Artificial Sequence; identical to SEQ ID NO: 2057
  source: /note="Description of Artificial Sequence: Synthetic oligonucleotide"

SEQ ID NO: 2060 - DNA, 50 bp, Artificial Sequence
  source: /note="Description of Artificial Sequence: Synthetic oligonucleotide"
gtgccaccggcctcccaagccataccatgtcccctcagcgacgagctccg

SEQ ID NO: 2061 - DNA, 50 bp, Artificial Sequence; identical to SEQ ID NO: 2060
  source: /note="Description of Artificial Sequence: Synthetic oligonucleotide"

SEQ ID NO: 2062 - DNA, 50 bp, Artificial Sequence
  source: /note="Description of Artificial Sequence: Synthetic oligonucleotide"
ctccagctcaatctggtgcagcagtggggtgaaaatacdccaggystcac

SEQ ID NO: 2063 - DNA, 50 bp, Artificial Sequence
  source: /note="Description of Artificial Sequence: Synthetic oligonucleotide"
aatctggtgcagcagtggggtgaaaatacgccaggcctcacggagctcga

SEQ ID NO: 2064 - DNA, 50 bp, Artificial Sequence; identical to SEQ ID NO: 2063
  source: /note="Description of Artificial Sequence: Synthetic oligonucleotide"

SEQ ID NO: 2065 - DNA, 50 bp, Artificial Sequence; identical to SEQ ID NO: 2063
  source: /note="Description of Artificial Sequence: Synthetic oligonucleotide"

SEQ ID NO: 2066 - DNA, 50 bp, Artificial Sequence
  source: /note="Description of Artificial Sequence: Synthetic oligonucleotide"
atctggtgcagcagtggggtgaaaatacgccaggcctcacggagctcgtc

SEQ ID NO: 2067 - DNA, 50 bp, Artificial Sequence; identical to SEQ ID NO: 2066
  source: /note="Description of Artificial Sequence: Synthetic oligonucleotide"

SEQ ID NO: 2068 - DNA, 50 bp, Artificial Sequence; identical to SEQ ID NO: 2066
  source: /note="Description of Artificial Sequence: Synthetic oligonucleotide"

SEQ ID NO: 2069 - DNA, 50 bp, Artificial Sequence
  source: /note="Description of Artificial Sequence: Synthetic oligonucleotide"
tatgagcgcctcatcctggacgtcttctgcgggagccagatgcacttcga

SEQ ID NO: 2070 - DNA, 50 bp, Artificial Sequence; identical to SEQ ID NO: 2069
  source: /note="Description of Artificial Sequence: Synthetic oligonucleotide"

SEQ ID NO: 2071 - DNA, 50 bp, Artificial Sequence; identical to SEQ ID NO: 2069
  source: /note="Description of Artificial Sequence: Synthetic oligonucleotide"

SEQ ID NO: 2072 - DNA, 50 bp, Artificial Sequence
  source: /note="Description of Artificial Sequence: Synthetic oligonucleotide"
tccctgacgcctatgagcgcctcatcctggacgtcttctgcrggrgccac

SEQ ID NO: 2073 - DNA, 50 bp, Artificial Sequence; identical to SEQ ID NO: 2072
  source: /note="Description of Artificial Sequence: Synthetic oligonucleotide"

SEQ ID NO: 2074 - DNA, 50 bp, Artificial Sequence; identical to SEQ ID NO: 2072
  source: /note="Description of Artificial Sequence: Synthetic oligonucleotide"

SEQ ID NO: 2075 - DNA, 50 bp, Artificial Sequence
  source: /note="Description of Artificial Sequence: Synthetic oligonucleotide"
cctgcgcacgaagtgcatctggctccygcagaagacgtccaggatgargg

SEQ ID NO: 2076 - DNA, 50 bp, Artificial Sequence
  source: /note="Description of Artificial Sequence: Synthetic oligonucleotide"
cctgcgcacgaagtgcatctggctcccgcagaagacgtccaggatgaggg

SEQ ID NO: 2077 - DNA, 50 bp, Artificial Sequence; identical to SEQ ID NO: 2076
  source: /note="Description of Artificial Sequence: Synthetic oligonucleotide"

SEQ ID NO: 2078 - DNA, 50 bp, Artificial Sequence
  source: /note="Description of Artificial Sequence: Synthetic oligonucleotide"
gaccaagaagccgggcatgttcttcaaccccgaggagtcggagctggacc

SEQ ID NO: 2079 - DNA, 50 bp, Artificial Sequence
  source: /note="Description of Artificial Sequence: Synthetic oligonucleotide"
gaccaagaagccgggcatgttcttcaaccccraggagtcggagctggacc

SEQ ID NO: 2080 - DNA, 50 bp, Artificial Sequence; identical to SEQ ID NO: 2079
  source: /note="Description of Artificial Sequence: Synthetic oligonucleotide"

SEQ ID NO: 2081 - DNA, 50 bp, Artificial Sequence; identical to SEQ ID NO: 1246
  source: /note="Description of Artificial Sequence: Synthetic oligonucleotide"

SEQ ID NO: 2082 - DNA, 50 bp, Artificial Sequence
  source: /note="Description of Artificial Sequence: Synthetic oligonucleotide"
gtgcagcccaacgaggccgtgtacaccaagatgatgaccaagaagysgkg

SEQ ID NO: 2083 - DNA, 50 bp, Artificial Sequence
  source: /note="Description of Artificial Sequence: Synthetic oligonucleotide"
gccgtaggtcaggtccagctccgactcctcggggttgaagaacatgcccc

SEQ ID NO: 2084 - DNA, 50 bp, Artificial Sequence; identical to SEQ ID NO: 2083
  source: /note="Description of Artificial Sequence: Synthetic oligonucleotide"

SEQ ID NO: 2085 - DNA, 50 bp, Artificial Sequence; identical to SEQ ID NO: 2083
  source: /note="Description of Artificial Sequence: Synthetic oligonucleotide"

SEQ ID NO: 2086 - DNA, 50 bp, Artificial Sequence
  source: /note="Description of Artificial Sequence: Synthetic oligonucleotide"
cccggcttcttggtcatcatcttggtgtacacggccyygttgrgctgcag

SEQ ID NO: 2087 - DNA, 50 bp, Artificial Sequence; identical to SEQ ID NO: 2086
  source: /note="Description of Artificial Sequence: Synthetic oligonucleotide"

SEQ ID NO: 2088 - DNA, 50 bp, Artificial Sequence
  source: /note="Description of Artificial Sequence: Synthetic oligonucleotide"
cggcgacatcttccaccagcagtgcaagcgcaacgagctggtgatccgcc

SEQ ID NO: 2089 - DNA, 50 bp, Artificial Sequence
  source: /note="Description of Artificial Sequence: Synthetic oligonucleotide"
ggccggcgacatcttccaccagcagtgcaagcgcracgrgctggtgaycc

SEQ ID NO: 2090 - DNA, 50 bp, Artificial Sequence; identical to SEQ ID NO: 2089
  source: /note="Description of Artificial Sequence: Synthetic oligonucleotide"

SEQ ID NO: 2091 - DNA, 50 bp, Artificial Sequence; identical to SEQ ID NO: 2089
  source: /note="Description of Artificial Sequence: Synthetic oligonucleotide"

SEQ ID NO: 2092 - DNA, 50 bp, Artificial Sequence
  source: /note="Description of Artificial Sequence: Synthetic oligonucleotide"
tgaggctgcagttccatgatgtggccggcgacatcytccaccagcagykg

SEQ ID NO: 2093 - DNA, 50 bp, Artificial Sequence; identical to SEQ ID NO: 2092
  source: /note="Description of Artificial Sequence: Synthetic oligonucleotide"

SEQ ID NO: 2094 - DNA, 50 bp, Artificial Sequence
  source: /note="Description of Artificial Sequence: Synthetic oligonucleotide"
tgaggctgcagttccatgatgtggccggcgacatcttccaccagcagtgg

SEQ ID NO: 2095 - DNA, 50 bp, Artificial Sequence
  source: /note="Description of Artificial Sequence: Synthetic oligonucleotide"
aagatgtcgccggccacatcatggaaytgcagcctcacctcggccttgcc

SEQ ID NO: 2096 - DNA, 50 bp, Artificial Sequence
  source: /note="Description of Artificial Sequence: Synthetic oligonucleotide"
tgtcgccggccacatcatggaactgcagcctcacctcggcctygcgctcg

SEQ ID NO: 2097 - DNA, 50 bp, Artificial Sequence; identical to SEQ ID NO: 1328
  source: /note="Description of Artificial Sequence: Synthetic oligonucleotide"

SEQ ID NO: 2098 - DNA, 50 bp, Artificial Sequence
  source: /note="Description of Artificial Sequence: Synthetic oligonucleotide"
tccgccacgtaggggtgcccttcatcctgcgctgcggcaaggccctgaag

SEQ ID NO: 2099 - DNA, 50 bp, Artificial Sequence
  source: /note="Description of Artificial Sequence: Synthetic oligonucleotide"
gggcatgcccagttctgccttgctgggcctcgaaggcatcacctaccatc

SEQ ID NO: 2100 - DNA, 50 bp, Artificial Sequence; identical to SEQ ID NO: 2099
  source: /note="Description of Artificial Sequence: Synthetic oligonucleotide"

SEQ ID NO: 2101 - DNA, 50 bp, Artificial Sequence; identical to SEQ ID NO: 2099
  source: /note="Description of Artificial Sequence: Synthetic oligonucleotide"

SEQ ID NO: 2102 - DNA, 50 bp, Artificial Sequence
  source: /note="Description of Artificial Sequence: Synthetic oligonucleotide"
gttctgccttgctgggcctcgaaggcatcacctaccatcccacctctcaa

SEQ ID NO: 2103 - DNA, 50 bp, Artificial Sequence; identical to SEQ ID NO: 2102
  source: /note="Description of Artificial Sequence: Synthetic oligonucleotide"

SEQ ID NO: 2104 - DNA, 50 bp, Artificial Sequence; identical to SEQ ID NO: 2102
  source: /note="Description of Artificial Sequence: Synthetic oligonucleotide"

SEQ ID NO: 2105 - DNA, 50 bp, Artificial Sequence
  source: /note="Description of Artificial Sequence: Synthetic oligonucleotide"
ggtcctgggccagtacgtggggaaccccgatggagagggcraggccacgg

SEQ ID NO: 2106 - DNA, 50 bp, Artificial Sequence; identical to SEQ ID NO: 2105
  source: /note="Description of Artificial Sequence: Synthetic oligonucleotide"

SEQ ID NO: 2107 - DNA, 50 bp, Artificial Sequence
  source: /note="Description of Artificial Sequence: Synthetic oligonucleotide"
ggtcctgggccagtacgtggggaaccccgatggagagggcgaggccacgg

SEQ ID NO: 2108 - DNA, 50 bp, Artificial Sequence
  source: /note="Description of Artificial Sequence: Synthetic oligonucleotide"
ccaggtaccctttggtggcctcgccctctccatcggggttcyccacgtac

SEQ ID NO: 2109 - DNA, 50 bp, Artificial Sequence; identical to SEQ ID NO: 2108
  source: /note="Description of Artificial Sequence: Synthetic oligonucleotide"

SEQ ID NO: 2110 - DNA, 50 bp, Artificial Sequence; identical to SEQ ID NO: 2108
  source: /note="Description of Artificial Sequence: Synthetic oligonucleotide"

SEQ ID NO: 2111 - DNA, 50 bp, Artificial Sequence
  source: /note="Description of Artificial Sequence: Synthetic oligonucleotide"
gcagatgctgtgtctggtggccatggagaagcccgccyycdccaactcac

SEQ ID NO: 2112 - DNA, 50 bp, Artificial Sequence; identical to SEQ ID NO: 2111
  source: /note="Description of Artificial Sequence: Synthetic oligonucleotide"

SEQ ID NO: 2113 - DNA, 50 bp, Artificial Sequence; identical to SEQ ID NO: 2111
  source: /note="Description of Artificial Sequence: Synthetic oligonucleotide"

SEQ ID NO: 2114 - DNA, 50 bp, Artificial Sequence
  source: /note="Description of Artificial Sequence: Synthetic oligonucleotide"
ccacctactgcagatgctgtgtctggtggccatggagaagcccgcctccg

SEQ ID NO: 2115 - DNA, 50 bp, Artificial Sequence; identical to SEQ ID NO: 2114
  source: /note="Description of Artificial Sequence: Synthetic oligonucleotide"

SEQ ID NO: 2116 - DNA, 50 bp, Artificial Sequence; identical to SEQ ID NO: 2114
  source: /note="Description of Artificial Sequence: Synthetic oligonucleotide"

SEQ ID NO: 2117 - DNA, 50 bp, Artificial Sequence
  source: /note="Description of Artificial Sequence: Synthetic oligonucleotide"
caccccctaccttctcatcacggacgtcatctgagttggtggaggcgggc

SEQ ID NO: 2118 - DNA, 50 bp, Artificial Sequence; identical to SEQ ID NO: 2117
  source: /note="Description of Artificial Sequence: Synthetic oligonucleotide"

SEQ ID NO: 2119 - DNA, 50 bp, Artificial Sequence; identical to SEQ ID NO: 2117
  source: /note="Description of Artificial Sequence: Synthetic oligonucleotide"

SEQ ID NO: 2120 - DNA, 50 bp, Artificial Sequence
  source: /note="Description of Artificial Sequence: Synthetic oligonucleotide"
ccctaccttctcatcacggacgtcatctgagttggtggaggcgggcttca

SEQ ID NO: 2121 - DNA, 50 bp, Artificial Sequence
  source: /note="Description of Artificial Sequence: Synthetic oligonucleotide"
ccctaccttctcatcacggacgtcatctgagttggtggrggcggrsttca

SEQ ID NO: 2122 - DNA, 50 bp, Artificial Sequence; identical to SEQ ID NO: 2120
  source: /note="Description of Artificial Sequence: Synthetic oligonucleotide"

SEQ ID NO: 2123 - DNA, 50 bp, Artificial Sequence
  source: /note="Description of Artificial Sequence: Synthetic oligonucleotide"
tcatcacggacgtcatctgagttggtggaggcgggcttctccatggccag

SEQ ID NO: 2124 - DNA, 50 bp, Artificial Sequence; identical to SEQ ID NO: 2123
  source: /note="Description of Artificial Sequence: Synthetic oligonucleotide"

SEQ ID NO: 2125 - DNA, 50 bp, Artificial Sequence; identical to SEQ ID NO: 2123
  source: /note="Description of Artificial Sequence: Synthetic oligonucleotide"

SEQ ID NO: 2126 - DNA, 50 bp, Artificial Sequence
  source: /note="Description of Artificial Sequence: Synthetic oligonucleotide"
ctttggcactgagggtcgcgggggctatttcgatgaatttgggatcatcc

SEQ ID NO: 2127 - DNA, 50 bp, Artificial Sequence; identical to SEQ ID NO: 2126
  source: /note="Description of Artificial Sequence: Synthetic oligonucleotide"

SEQ ID NO: 2128 - DNA, 50 bp, Artificial Sequence; identical to SEQ ID NO: 2126
  source: /note="Description of Artificial Sequence: Synthetic oligonucleotide"

SEQ ID NO: 2129 - DNA, 50 bp, Artificial Sequence; identical to SEQ ID NO: 1458
  source: /note="Description of Artificial Sequence: Synthetic oligonucleotide"

SEQ ID NO: 2130 - DNA, 50 bp, Artificial Sequence; identical to SEQ ID NO: 1458
  source: /note="Description of Artificial Sequence: Synthetic oligonucleotide"

SEQ ID NO: 2131 - DNA, 50 bp, Artificial Sequence; identical to SEQ ID NO: 1458
  source: /note="Description of Artificial Sequence: Synthetic oligonucleotide"

SEQ ID NO: 2132 - DNA, 50 bp, Artificial Sequence
  source: /note="Description of Artificial Sequence: Synthetic oligonucleotide"
cgcaggcgatgttgtcccggttccagatggggccgaagatcctgttggcc

SEQ ID NO: 2133 - DNA, 50 bp, Artificial Sequence; identical to SEQ ID NO: 2132
  source: /note="Description of Artificial Sequence: Synthetic oligonucleotide"

SEQ ID NO: 2134 - DNA, 50 bp, Artificial Sequence; identical to SEQ ID NO: 2132
  source: /note="Description of Artificial Sequence: Synthetic oligonucleotide"

SEQ ID NO: 2135 - DNA, 50 bp, Artificial Sequence
  source: /note="Description of Artificial Sequence: Synthetic oligonucleotide"
ctaccgcatcgaccactacctgggcaaggagatggtgcagaacctcrtgg

SEQ ID NO: 2136 - DNA, 50 bp, Artificial Sequence
  source: /note="Description of Artificial Sequence: Synthetic oligonucleotide"
ctaccgcatcgaccactacctgggcaaggagatggtgcagaacctcatgg

SEQ ID NO: 2137 - DNA, 50 bp, Artificial Sequence; identical to SEQ ID NO: 2136
  source: /note="Description of Artificial Sequence: Synthetic oligonucleotide"

SEQ ID NO: 2138 - DNA, 50 bp, Artificial Sequence
  source: /note="Description of Artificial Sequence: Synthetic oligonucleotide"
cagcaccatgaggttctgcaccatctccttgcccaggtagtggtcgaygc

SEQ ID NO: 2139 - DNA, 50 bp, Artificial Sequence; identical to SEQ ID NO: 2138
  source: /note="Description of Artificial Sequence: Synthetic oligonucleotide"

SEQ ID NO: 2140 - DNA, 50 bp, Artificial Sequence; identical to SEQ ID NO: 2138
  source: /note="Description of Artificial Sequence: Synthetic oligonucleotide"

SEQ ID NO: 2141 - DNA, 50 bp, Artificial Sequence
  source: /note="Description of Artificial Sequence: Synthetic oligonucleotide"
agcaccatgaggttctgcaccatctccttgcccaggtagtggtcgaygcg

SEQ ID NO: 2142 - DNA, 50 bp, Artificial Sequence
  source: /note="Description of Artificial Sequence: Synthetic oligonucleotide"
ccatctccttgcccaggtagtggtcgaygbrgtagatctggtcctcacgg

SEQ ID NO: 2143 - DNA, 50 bp, Artificial Sequence; identical to SEQ ID NO: 2142
  source: /note="Description of Artificial Sequence: Synthetic oligonucleotide"

SEQ ID NO: 2144 - DNA, 50 bp, Artificial Sequence
  source: /note="Description of Artificial Sequence: Synthetic oligonucleotide"
ccatctccttgcccaggtagtggtcgatgcggtagatctggtcctcacgg

SEQ ID NO: 2145 - DNA, 50 bp, Artificial Sequence
  source: /note="Description of Artificial Sequence: Synthetic oligonucleotide"
cccaggtagtggtcgatgcggtagatctggtcctcacgsaacagggagat

SEQ ID NO: 2146 - DNA, 50 bp, Artificial Sequence
  source: /note="Description of Artificial Sequence: Synthetic oligonucleotide"
cccaggtagtggtcgatgcggtagatctggtcctcacggaacagggagat

SEQ ID NO: 2147 - DNA, 50 bp, Artificial Sequence; identical to SEQ ID NO: 2146
  source: /note="Description of Artificial Sequence: Synthetic oligonucleotide"

SEQ ID NO: 2148 - DNA, 50 bp, Artificial Sequence; identical to SEQ ID NO: 1490
  source: /note="Description of Artificial Sequence: Synthetic oligonucleotide"

SEQ ID NO: 2149 - DNA, 50 bp, Artificial Sequence
  source: /note="Description of Artificial Sequence: Synthetic oligonucleotide"
gtagatctggtcctcacggaacagggagragatgtggttggacagccrgt

SEQ ID NO: 2150 - DNA, 50 bp, Artificial Sequence; identical to SEQ ID NO: 1488
  source: /note="Description of Artificial Sequence: Synthetic oligonucleotide"

SEQ ID NO: 2151 - DNA, 50 bp, Artificial Sequence
  source: /note="Description of Artificial Sequence: Synthetic oligonucleotide"
tggtcctcacggaacagggaggagatgtggttggacagccrgwcagagca

SEQ ID NO: 2152 - DNA, 50 bp, Artificial Sequence; identical to SEQ ID NO: 2151
  source: /note="Description of Artificial Sequence: Synthetic oligonucleotide"

SEQ ID NO: 2153 - DNA, 50 bp, Artificial Sequence; identical to SEQ ID NO: 2151
  source: /note="Description of Artificial Sequence: Synthetic oligonucleotide"

SEQ ID NO: 2154 - DNA, 50 bp, Artificial Sequence; identical to SEQ ID NO: 2151
  source: /note="Description of Artificial Sequence: Synthetic oligonucleotide"

SEQ ID NO: 2155 - DNA, 50 bp, Artificial Sequence
  source: /note="Description of Artificial Sequence: Synthetic oligonucleotide"
gggaggagatgtggttggacagccggtcagagctctgcaggtccctcccg

SEQ ID NO: 2156 - DNA, 50 bp, Artificial Sequence; identical to SEQ ID NO: 2155
  source: /note="Description of Artificial Sequence: Synthetic oligonucleotide"

SEQ ID NO: 2157 - DNA, 50 bp, Artificial Sequence; identical to SEQ ID NO: 2155
  source: /note="Description of Artificial Sequence: Synthetic oligonucleotide"

SEQ ID NO: 2158 - DNA, 50 bp, Artificial Sequence
  source: /note="Description of Artificial Sequence: Synthetic oligonucleotide"
ccccgaccgtctacgaggccgtcaccaagaacattcacgagtcctgcatg

SEQ ID NO: 2159 - DNA, 50 bp, Artificial Sequence; identical to SEQ ID NO: 2158
  source: /note="Description of Artificial Sequence: Synthetic oligonucleotide"

SEQ ID NO: 2160 - DNA, 50 bp, Artificial Sequence; identical to SEQ ID NO: 2158
  source: /note="Description of Artificial Sequence: Synthetic oligonucleotide"

SEQ ID NO: 2161 - DNA, 50 bp, Artificial Sequence
  source: /note="Description of Artificial Sequence: Synthetic oligonucleotide"
ctacctggccttgcccccgaccgtctacraggccgtcaccaagaacattc

SEQ ID NO: 2162 - DNA, 50 bp, Artificial Sequence; identical to SEQ ID NO: 2161
  source: /note="Description of Artificial Sequence: Synthetic oligonucleotide"

SEQ ID NO: 2163 - DNA, 50 bp, Artificial Sequence; identical to SEQ ID NO: 2161
  source: /note="Description of Artificial Sequence: Synthetic oligonucleotide"

SEQ ID NO: 2164 - DNA, 50 bp, Artificial Sequence
  source: /note="Description of Artificial Sequence: Synthetic oligonucleotide"
gtagacggtcgggggcaaggccaggtagaagargcrgktggcctgtgacc

SEQ ID NO: 2165 - DNA, 50 bp, Artificial Sequence; identical to SEQ ID NO: 2164
  source: /note="Description of Artificial Sequence: Synthetic oligonucleotide"

SEQ ID NO: 2166 - DNA, 50 bp, Artificial Sequence; identical to SEQ ID NO: 2164
  source: /note="Description of Artificial Sequence: Synthetic oligonucleotide"

SEQ ID NO: 2167 - DNA, 50 bp, Artificial Sequence
  source: /note="Description of Artificial Sequence: Synthetic oligonucleotide"
cgggggcaaggccaggtagaagaggcggttggcctgtgaccccaggtggc

SEQ ID NO: 2168 - DNA, 50 bp, Artificial Sequence
  source: /note="Description of Artificial Sequence: Synthetic oligonucleotide"
ggcaaggccaggtagaagaggcggttggcctgtgaccccaggtggagggc

SEQ ID NO: 2169 - DNA, 50 bp, Artificial Sequence
  source: /note="Description of Artificial Sequence: Synthetic oligonucleotide"
ccagtacgatgatgcagcctcctaccagcgcctcaacagccacatkratg

SEQ ID NO: 2170 - DNA, 50 bp, Artificial Sequence
  source: /note="Description of Artificial Sequence: Synthetic oligonucleotide"
tggccagtacgatgatgcagcctccyaccagcgcctcaacagccacatkg

SEQ ID NO: 2171 - DNA, 50 bp, Artificial Sequence
  source: /note="Description of Artificial Sequence: Synthetic oligonucleotide"
aaggccaggtagaagaggcggttggcctgtgaccccaggtggagggcatc

SEQ ID NO: 2172 - DNA, 50 bp, Artificial Sequence
  source: /note="Description of Artificial Sequence: Synthetic oligonucleotide"
gtggctgttgaggcgctggtaggaggctgcatcatcgtactggccagcct

SEQ ID NO: 2173 - DNA, 50 bp, Artificial Sequence
  source: /note="Description of Artificial Sequence: Synthetic oligonucleotide"
gtggctgttgaggcgctggtaggaggctgcatcatygtactggccagcct

SEQ ID NO: 2174 - DNA, 50 bp, Artificial Sequence; identical to SEQ ID NO: 2173
  source: /note="Description of Artificial Sequence: Synthetic oligonucleotide"

SEQ ID NO: 2175 - DNA, 50 bp, Artificial Sequence; identical to SEQ ID NO: 2172
  source: /note="Description of Artificial Sequence: Synthetic oligonucleotide"

SEQ ID NO: 2176 - DNA, 50 bp, Artificial Sequence
  source: /note="Description of Artificial Sequence: Synthetic oligonucleotide"
gccaccccagaggagaagctcaagctggaggacttctttgcccrcaactc

SEQ ID NO: 2177 - DNA, 50 bp, Artificial Sequence
  source: /note="Description of Artificial Sequence: Synthetic oligonucleotide"
gttgaggcgctggtaggaggctgcatcatcgtactggccagccacatagg

SEQ ID NO: 2178 - DNA, 50 bp, Artificial Sequence
  source: /note="Description of Artificial Sequence: Synthetic oligonucleotide"
gccaccccagaggagaagctcaagctggaggacttctttgcccgcaactg

SEQ ID NO: 2179 - DNA, 50 bp, Artificial Sequence
  source: /note="Description of Artificial Sequence: Synthetic oligonucleotide"
ttgcggatgtcagccactgtgaggcgggaacgggcayrgcccaygatgat

SEQ ID NO: 2180 - DNA, 50 bp, Artificial Sequence
  source: /note="Description of Artificial Sequence: Synthetic oligonucleotide"
ttgcggatgtcagccactgtgaggcgggaacgggcatagcccacgatgat

SEQ ID NO: 2181 - DNA, 50 bp, Artificial Sequence; identical to SEQ ID NO: 2180
  source: /note="Description of Artificial Sequence: Synthetic oligonucleotide"

SEQ ID NO: 2182 - DNA, 50 bp, Artificial Sequence
  source: /note="Description of Artificial Sequence: Synthetic oligonucleotide"
agccactgtgaggcgggaacgggcatagcccacgatgaaggtgttttcgg

SEQ ID NO: 2183 - DNA, 50 bp, Artificial Sequence; identical to SEQ ID NO: 2182
  source: /note="Description of Artificial Sequence: Synthetic oligonucleotide"

SEQ ID NO: 2184 - DNA, 50 bp, Artificial Sequence; identical to SEQ ID NO: 2182
  source: /note="Description of Artificial Sequence: Synthetic oligonucleotide"

SEQ ID NO: 2185 - DNA, 50 bp, Artificial Sequence; identical to SEQ ID NO: 2182
  source: /note="Description of Artificial Sequence: Synthetic oligonucleotide"

SEQ ID NO: 2186 - DNA, 50 bp, Artificial Sequence
  source: /note="Description of Artificial Sequence: Synthetic oligonucleotide"
agcccacgatgaaggtgttttcgggcagaaggccatycyrgaacagccag

SEQ ID NO: 2187 - DNA, 50 bp, Artificial Sequence; identical to SEQ ID NO: 2186
  source: /note="Description of Artificial Sequence: Synthetic oligonucleotide"

SEQ ID NO: 2188 - DNA, 50 bp, Artificial Sequence
  source: /note="Description of Artificial Sequence: Synthetic oligonucleotide"
agcccacgatgaaggtgttttcgggcagaaggccatcccggaacagccag

SEQ ID NO: 2189 - DNA, 50 bp, Artificial Sequence
  source: /note="Description of Artificial Sequence: Synthetic oligonucleotide"
acacctgttccctctgccacagggtgacctggccaagaagaagatctacc

SEQ ID NO: 2190 - DNA, 50 bp, Artificial Sequence
  source: /note="Description of Artificial Sequence: Synthetic oligonucleotide"
cagccacttctaaccacacacctgttccctctgccacagggtgacctggc

SEQ ID NO: 2191 - DNA, 50 bp, Artificial Sequence
  source: /note="Description of Artificial Sequence: Synthetic oligonucleotide"
gcagtggtgggacacacttaccagatggtggggtagatcttcttcttggc

SEQ ID NO: 2192 - DNA, 50 bp, Artificial Sequence
  source: /note="Description of Artificial Sequence: Synthetic oligonucleotide"
gcagtggtgggacacacttaccagatggtggrgtagrtcttcttcttggc

SEQ ID NO: 2193 - DNA, 50 bp, Artificial Sequence
  source: /note="Description of Artificial Sequence: Synthetic oligonucleotide"
ccagccacttctaaccacacacctgttccctctgccacagggtgacctgg

SEQ ID NO: 2194 - DNA, 50 bp, Artificial Sequence
  source: /note="Description of Artificial Sequence: Synthetic oligonucleotide"
cttttaagattggggcctgggagatactcaccgatgcacccrtgatgaat

SEQ ID NO: 2195 - DNA, 50 bp, Artificial Sequence; identical to SEQ ID NO: 2194
  source: /note="Description of Artificial Sequence: Synthetic oligonucleotide"

SEQ ID NO: 2196 - DNA, 50 bp, Artificial Sequence
  source: /note="Description of Artificial Sequence: Synthetic oligonucleotide"
cttttaagattggggcctgggagatactcaccgatgcacccatgatgaat

SEQ ID NO: 2197 - DNA, 50 bp, Artificial Sequence
  source: /note="Description of Artificial Sequence: Synthetic oligonucleotide"
gcatcgccctggaaaagctcttcccgcaggatccygcacamctgggtccg

SEQ ID NO: 2198 - DNA, 50 bp, Artificial Sequence; identical to SEQ ID NO: 898
  source: /note="Description of Artificial Sequence: Synthetic oligonucleotide"

SEQ ID NO: 2199 - DNA, 50 bp, Artificial Sequence
  source: /note="Description of Artificial Sequence: Synthetic oligonucleotide"
tttacaaggaccccagctccttaacacagatcccagctccgaggaaactc

SEQ ID NO: 2200 - DNA, 50 bp, Artificial Sequence; identical to SEQ ID NO: 2199
  source: /note="Description of Artificial Sequence: Synthetic oligonucleotide"

SEQ ID NO: 2201 - DNA, 50 bp, Artificial Sequence; identical to SEQ ID NO: 2199
  source: /note="Description of Artificial Sequence: Synthetic oligonucleotide"

SEQ ID NO: 2202 - DNA, 50 bp, Artificial Sequence
  source: /note="Description of Artificial Sequence: Synthetic oligonucleotide"
ccttaaaaggggacaaatgagtgcccattgaactacacattacagctgcc

SEQ ID NO: 2203 - DNA, 50 bp, Artificial Sequence; identical to SEQ ID NO: 2202
  source: /note="Description of Artificial Sequence: Synthetic oligonucleotide"

SEQ ID NO: 2204 - DNA, 50 bp, Artificial Sequence; identical to SEQ ID NO: 2202
  source: /note="Description of Artificial Sequence: Synthetic oligonucleotide"

SEQ ID NO: 2205 - DNA, 50 bp, Artificial Sequence; identical to SEQ ID NO: 938
  source: /note="Description of Artificial Sequence: Synthetic oligonucleotide"

SEQ ID NO: 2206 - DNA, 50 bp, Artificial Sequence; identical to SEQ ID NO: 982
  source: /note="Description of Artificial Sequence: Synthetic oligonucleotide"

SEQ ID NO: 2207 - DNA, 50 bp, Artificial Sequence; identical to SEQ ID NO: 900
  source: /note="Description of Artificial Sequence: Synthetic oligonucleotide"

SEQ ID NO: 2208 - DNA, 50 bp, Artificial Sequence
  source: /note="Description of Artificial Sequence: Synthetic oligonucleotide"
ttcccagttcccgctttgtgcccttctgcccatcacccaccrgmktggtc

SEQ ID NO: 2209 - DNA, 50 bp, Artificial Sequence
  source: /note="Description of Artificial Sequence: Synthetic oligonucleotide"
tttgtgcccttctgcccatcacccaccggagtggttggcgaaggcggcag

SEQ ID NO: 2210 - DNA, 50 bp, Artificial Sequence
  source: /note="Description of Artificial Sequence: Synthetic oligonucleotide"
ggcaagaagtcgctggagcagtgggtgaccgaggaggccgcctgcctttc

SEQ ID NO: 2211 - DNA, 50 bp, Artificial Sequence
  source: /note="Description of Artificial Sequence: Synthetic oligonucleotide"
ggcaagaagtcgctggagcagtgggtgaccragghggcygcctgcctttc

SEQ ID NO: 2212 - DNA, 50 bp, Artificial Sequence; identical to SEQ ID NO: 2210
  source: /note="Description of Artificial Sequence: Synthetic oligonucleotide"

SEQ ID NO: 2213 - DNA, 50 bp, Artificial Sequence; identical to SEQ ID NO: 1925
  source: /note="Description of Artificial Sequence: Synthetic oligonucleotide"

SEQ ID NO: 2214 - DNA, 50 bp, Artificial Sequence
  source: /note="Description of Artificial Sequence: Synthetic oligonucleotide"
ggcggcacaaaggcaggcggcctcctcggtcacccactgctccagcgacc

SEQ ID NO: 2215 - DNA, 50 bp, Artificial Sequence
  source: /note="Description of Artificial Sequence: Synthetic oligonucleotide"
gttcctggcgcgctatgggcccgcgtggcgcgagcagaggcgcttctccg

SEQ ID NO: 2216 - DNA, 50 bp, Artificial Sequence; identical to SEQ ID NO: 2215
  source: /note="Description of Artificial Sequence: Synthetic oligonucleotide"

SEQ ID NO: 2217 - DNA, 50 bp, Artificial Sequence; identical to SEQ ID NO: 2215
  source: /note="Description of Artificial Sequence: Synthetic oligonucleotide"

SEQ ID NO: 2218 - DNA, 19 bp, Homo sapiens
tggggcgaaaggggcgaaa

SEQ ID NO: 2219 - DNA, 10 bp, Homo sapiens
tatatatata

SEQ ID NO: 2220 - DNA, 12 bp, Homo sapiens
tatatatatata

SEQ ID NO: 2221 - DNA, 14 bp, Homo sapiens
tatatatatatata

SEQ ID NO: 2222 - DNA, 16 bp, Homo sapiens
tatatatatatatata

SEQ ID NO: 2223 - DNA, 25 bp, Homo sapiens
cgtggggtcgtccaggtaccctttg

SEQ ID NO: 2224 - DNA, 20 bp, Homo sapiens
gcacatccggatgtaggatc

SEQ ID NO: 2225 - DNA, 10 bp, Homo sapiens
cagtgggcac
